(19) United States
(12) Patent Application Publication
(10) Pub. No.: US 2011/0271404 A1
(43) Pub. Date: Nov. 3, 2011

(54) Plants Having Enhanced Yield-Related Traits and a Method for Making the Same

(75) Inventors: Yves Hatzfeld, Lille (FR); Valerie Frankard, Waterloo (BE); Christophe Reuzeau, Tocan Saint Apre (FR)

(73) Assignee: BASF Plant Science GmbH, Ludwigshafen (DE)

(21) Appl. No.: 13/120,460

(22) PCT Filed: Sep. 21, 2009
(86) PCT No.: PCT/EP2009/062174

§ 371 Date: Mar. 23, 2011

Related U.S. Application Data
(60) Provisional application No. 61/099,629, filed on Sep. 24, 2008.
(60) Provisional application No. 61/103,301, filed on Oct. 7, 2008.
(60) Provisional application No. 61/107,695, filed on Oct. 23, 2008.
(60) Provisional application No. 61/107,680, filed on Oct. 23, 2008.
(60) Provisional application No. 61/180,953, filed on May 26, 2009.

(30) Foreign Application Priority Data
Sep. 24, 2008 (EP) 08165001.2
Oct. 7, 2008 (EP) 08166008.6
Oct. 23, 2008 (EP) 08167387.3
Oct. 23, 2008 (EP) 08167390.7
Apr. 29, 2009 (EP) 09100261.8

(51) Int. Cl. C12N 15/82; A01H 5/10; C12N 9/10; C12N 5/10; C07H 21/04; A01H 5/00; C12N 15/63

(52) U.S. Cl. 800/287; 800/278; 800/290; 800/298; 435/320.1; 435/419; 800/320; 800/320.1; 800/320.2; 800/320.3; 536/23.2; 435/193

(57) ABSTRACT

The present invention relates generally to the field of molecular biology and concerns a method for enhancing various economically important yield-related traits in plants. More specifically, the present invention concerns a method for enhancing yield-related traits in plants by modulating expression in a plant of a nucleic acid encoding an ASPAT (Asparatate AminoTransferase) polypeptide. The present invention also concerns plants having modulated expression of a nucleic acid encoding an ASPAT polypeptide, which plants have enhanced yield-related traits relative to control plants. The invention also provides hitherto unknown ASPAT-encoding nucleic acids and constructs comprising the same, useful in performing the methods of the invention. Furthermore, the present invention relates generally to the field of molecular biology and concerns a method for increasing various plant yield-related traits by increasing expression in a plant of a nucleic acid sequence encoding a MYB91 like transcription factor (MYB91) polypeptide. The present invention also concerns plants having increased expression of a nucleic acid sequence encoding an MYB91 polypeptide, which plants have increased yield-related traits relative to control plants. The invention additionally relates to nucleic acid sequences, nucleic acid constructs, vectors and plants containing said nucleic acid sequences. Even furthermore, the present invention relates generally to the field of molecular biology and concerns a method for improving various plant growth characteristics by modulating expression in a plant of a nucleic acid encoding a GASA (Gibberellic Acid-Stimulated Arabidopsis). The present invention also concerns plants having modulated expression of a nucleic acid encoding a GASA, which plants have improved growth characteristics relative to corresponding wild type plants or other control plants. The invention also provides constructs useful in the methods of the invention. Yet furthermore, the present invention relates generally to the field of molecular biology and concerns a method for enhancing various economically important yield-related traits in plants. More specifically, the present invention concerns a method for enhancing yield-related traits in plants by modulating expression in a plant of a nucleic acid encoding an AUX/IAA (auxin/indoleacetic acid) polypeptide. The present invention also concerns plants having modulated expression of a nucleic acid encoding IAA polypeptide, which plants have enhanced yield-related traits relative to control plants. The invention also provides constructs comprising AUX/IAA-encoding nucleic acids, useful in performing the methods of the invention.

[0001] The present invention relates generally to the field of molecular biology and concerns a method for enhancing various economically important yield-related traits in plants. More specifically, the present invention concerns a method for enhancing yield-related traits in plants by modulating expression in a plant of a nucleic acid encoding an ASPAT (Asparatate AminoTransferase) polypeptide. The present invention also concerns plants having modulated expression of a nucleic acid encoding an ASPAT polypeptide, which plants have enhanced yield-related traits relative to control plants. The invention also provides hitherto unknown ASPAT-encoding nucleic acids and constructs comprising the same, useful in performing the methods of the invention.

[0002] Furthermore, the present invention relates generally to the field of molecular biology and concerns a method for increasing various plant yield-related traits by increasing expression in a plant of a nucleic acid sequence encoding a MYB91 like transcription factor (MYB91) polypeptide. The present invention also concerns plants having increased expression of a nucleic acid sequence encoding an MYB91 polypeptide, which plants have increased yield-related traits relative to control plants. The invention additionally relates to nucleic acid sequences, nucleic acid constructs, vectors and plants containing said nucleic acid sequences.

[0003] Even furthermore, the present invention relates generally to the field of molecular biology and concerns a method for improving various plant growth characteristics by modulating expression in a plant of a nucleic acid encoding a GASA (Gibberellic Acid-Stimulated Arabidopsis). The present invention also concerns plants having modulated expression of a nucleic acid encoding a GASA, which plants have improved growth characteristics relative to corresponding wild type plants or other control plants. The invention also provides constructs useful in the methods of the invention.

[0004] Yet furthermore, the present invention relates generally to the field of molecular biology and concerns a method for enhancing various economically important yield-related traits in plants. More specifically, the present invention concerns a method for enhancing yield-related traits in plants by modulating expression in a plant of a nucleic acid encoding an AUX/IAA (auxin/indoleacetic acid) polypeptide. The present invention also concerns plants having modulated expression of a nucleic acid encoding IAA polypeptide, which plants have enhanced yield-related traits relative to control plants. The invention also provides constructs comprising AUX/IAA-encoding nucleic acids, useful in performing the methods of the invention.

[0005] The ever-increasing world population and the dwindling supply of arable land available for agriculture fuels research towards increasing the efficiency of agriculture. Conventional means for crop and horticultural improvements utilise selective breeding techniques to identify plants having desirable characteristics. However, such selective breeding techniques have several drawbacks, namely that these techniques are typically labour intensive and result in plants that often contain heterogeneous genetic components that may not always result in the desirable trait being passed on from parent plants. Advances in molecular biology have allowed mankind to modify the germplasm of animals and plants. Genetic engineering of plants entails the isolation and manipulation of genetic material (typically in the form of DNA or RNA) and the subsequent introduction of that genetic material into a plant. Such technology has the capacity to deliver crops or plants having various improved economic, agronomic or horticultural traits.

[0006] A trait of particular economic interest is increased yield. Yield is normally defined as the measurable produce of economic value from a crop. This may be defined in terms of quantity and/or quality. Yield is directly dependent on several factors, for example, the number and size of the organs, plant architecture (for example, the number of branches), seed production, leaf senescence and more. Root development, nutrient uptake, stress tolerance and early vigour may also be important factors in determining yield. Optimizing the abovementioned factors may therefore contribute to increasing crop yield.

[0007] Seed yield is a particularly important trait, since the seeds of many plants are important for human and animal nutrition. Crops such as corn, rice, wheat, canola and soybean account for over half the total human caloric intake, whether through direct consumption of the seeds themselves or through consumption of meat products raised on processed seeds. They are also a source of sugars, oils and many kinds of metabolites used in industrial processes. Seeds contain an embryo (the source of new shoots and roots) and an endosperm (the source of nutrients for embryo growth during germination and during early growth of seedlings). The development of a seed involves many genes, and requires the transfer of metabolites from the roots, leaves and stems into the growing seed. The endosperm, in particular, assimilates the metabolic precursors of carbohydrates, oils and proteins and synthesizes them into storage macromolecules to fill out the grain.

[0008] Plant biomass is yield for forage crops like alfalfa, silage corn and hay. Many proxies for yield have been used in grain crops. Chief amongst these are estimates of plant size. Plant size can be measured in many ways depending on species and developmental stage, but include total plant dry weight, above-ground dry weight, above-ground fresh weight, leaf area, stem volume, plant height, rosette diameter, leaf length, root length, root mass, tiller number and leaf number. Many species maintain a conservative ratio between the size of different parts of the plant at a given developmental stage. These allometric relationships are used to extrapolate from one of these measures of size to another (e.g. Tittonell et al 2005 Agric Ecosys & Environ 105: 213). Plant size at an early developmental stage will typically correlate with plant size later in development. A larger plant with a greater leaf area can typically absorb more light and carbon dioxide than a smaller plant and therefore will likely gain a greater weight during the same period (Fasoula & Tollenaar 2005 Maydica 50:39). This is in addition to the potential continuation of the micro-environmental or genetic advantage that the plant had to achieve the larger size initially. There is a strong genetic component to plant size and growth rate (e.g. ter Steege et al 2005 Plant Physiology 139:1078), and so for a range of diverse genotypes plant size under one environmental condition is likely to correlate with size under another (Hittalmani et al 2003 Theoretical Applied Genetics 107:679). In this way a standard environment is used as a proxy for the diverse and dynamic environments encountered at different locations and times by crops in the field.

[0009] Another important trait for many crops is early vigour. Improving early vigour is an important objective of modern rice breeding programs in both temperate and tropical rice cultivars. Long roots are important for proper soil anchorage in water-seeded rice. Where rice is sown directly into flooded fields, and where plants must emerge rapidly through water, longer shoots are associated with vigour. Where drill-seeding is practiced, longer mesocotyls and coleoptiles are important for good seedling emergence. The ability to engineer early vigour into plants would be of great importance in agriculture. For example, poor early vigour has been a limitation to the introduction of maize (Zea mays L.) hybrids based on Corn Belt germplasm in the European Atlantic.

[0010] Harvest index, the ratio of seed yield to aboveground dry weight, is relatively stable under many environmental conditions and so a robust correlation between plant size and grain yield can often be obtained (e.g. Rebetzke et al 2002 Crop Science 42:739). These processes are intrinsically linked because the majority of grain biomass is dependent on current or stored photosynthetic productivity by the leaves and stem of the plant (Gardener et al 1985 Physiology of Crop Plants. Iowa State University Press, pp 68-73). Therefore, selecting for plant size, even at early stages of development, has been used as an indicator for future potential yield (e.g. Tittonell et al 2005 Agric Ecosys & Environ 105: 213). When testing for the impact of genetic differences on stress tolerance, the ability to standardize soil properties, temperature, water and nutrient availability and light intensity is an intrinsic advantage of greenhouse or plant growth chamber environments compared to the field. However, artificial limitations on yield due to poor pollination due to the absence of wind or insects, or insufficient space for mature root or canopy growth, can restrict the use of these controlled environments for testing yield differences. Therefore, measurements of plant size in early development, under standardized conditions in a growth chamber or greenhouse, are standard practices to provide indication of potential genetic yield advantages.

[0011] A further important trait is that of improved abiotic stress tolerance. Abiotic stress is a primary cause of crop loss worldwide, reducing average yields for most major crop plants by more than 50% (Wang et al., Planta (2003) 218: 1-14). Abiotic stresses may be caused by drought, salinity, extremes of temperature, chemical toxicity and oxidative stress. The ability to improve plant tolerance to abiotic stress would be of great economic advantage to farmers worldwide and would allow for the cultivation of crops during adverse conditions and in territories where cultivation of crops may not otherwise be possible.

[0012] Crop yield may therefore be increased by optimising one of the above-mentioned factors.

[0013] Depending on the end use, the modification of certain yield traits may be favoured over others. For example for applications such as forage or wood production, or bio-fuel resource, an increase in the vegetative parts of a plant may be desirable, and for applications such as flour, starch or oil production, an increase in seed parameters may be particularly desirable. Even amongst the seed parameters, some may be favoured over others, depending on the application. Various mechanisms may contribute to increasing seed yield, whether that is in the form of increased seed size or increased seed number.

[0014] One approach to increasing yield (seed yield and/or biomass) in plants may be through modification of the inherent growth mechanisms of a plant, such as the cell cycle or various signalling pathways involved in plant growth or in defense mechanisms.

[0015] Concerning ASPAT polypeptides, it has now been found that various yield-related traits may be improved in plants by modulating expression in a plant of a nucleic acid encoding an ASPAT (Aspartate AminoTransferase) in a plant.

[0016] Concerning MYB91 polypeptides, it has now been found that various yield-related traits may be increased in plants relative to control plants, by increasing expression in a plant of a nucleic acid sequence encoding a MYB91 like transcription factor (MYB91) polypeptide. The increased yield-related traits comprise one or more of: increased plant height, increased harvest index (HI), and increased Thousand Kernel Weight (TKW).

[0017] Concerning GASA polypeptides, it has now been found that various growth characteristics may be improved in plants by modulating expression in a plant of a nucleic acid encoding a GASA (Gibberellic Acid-Stimulated Arabidopsis) in a plant.

[0018] Concerning AUX/IAA polypeptides it has now been found that various growth characteristics may be improved in plants by modulating expression in a plant of a nucleic acid encoding an AUX/IAA polypeptide in a plant.

### BACKGROUND

[0019] 1. Aspartate AminoTransferase (ASPAT)

[0020] The capacity for growth, development and yield production of a plant is influenced by the regulation of carbon and nitrogen metabolisms and the N/C ratio in a the plant Lawlor 2002 Journal of Experimental Botany, Vol. 53, No. 370, pp. 773-787.

[0021] The enzyme Aspartate aminotransferase (ASPAT enzyme) catalyzes catalyses the reversible reaction of transamination between aspartate and 2-oxoglutarate to generate glutamate and oxaloacetate using pyridoxal 5¢-phosphate (PLP) as essential cofactor in a reaction that can be express as: L-aspartate+2-oxoglutarate=oxaloacetate+L-glutamate.

[0022] The enzyme plays a key role in the metabolic regulation of carbon and nitrogen metabolism in all organisms. Structurally and functionally the ASPAT enzyme is conserved in all organisms. In eukaryots the enzyme plays a critical role in the interchanges of carbon and nitrogen pools between subcellular compartments.

[0023] Aspartate aminotransferases are classified into the group I of the aminotransferase superfamily (Jensen and Gu, 1996). Further, Aspartate Aminotransferases have been classified in four subgroups. Subgroup Ia includes the ASPATs from eubacteria and eukaryotes, whereas subgroup Ib comprises the enzymes from some eubacteria including cyanobacteria and archaebacteria. A new group of ASPAT enzymes was described by De La Torre et al. 2006 Plant J. 2006, 46(3):414-25.

[0024] In plants, genes have been identified encoding ASPAT polypeptides that are targeted to different subcellular compartments and assembled into functional ASPAT Isoenzymes in the mitochondria, the cytosol, the peroxisome and the chloroplast.

[0025] 2. MYB91 Like Transcription Factor (MYB91)

[0026] DNA-binding proteins are proteins that comprise any of many DNA-binding domains and thus have a specific or general affinity to DNA. DNA-binding proteins include for example transcription factors that modulate the process of transcription, nucleases that cleave DNA molecules, and histones that are involved in DNA packaging in the cell nucleus.

[0027] Transcription factors are usually defined as proteins that show sequence-specific DNA binding affinity and that are capable of activating and/or repressing transcription. The Arabidopsis thaliana genome codes for at least 1533 transcriptional regulators, accounting for ˜5.9% of its estimated total number of genes (Riechmann et al. (2000) Science 290: 2105-2109). The Database of Rice Transcription Factors (DRTF) is a collection of known and predicted transcription factors of Oryza sativa L. ssp. indica and Oryza sativa L. ssp. japonica, and currently contains 2,025 putative transcription factors (TF) gene models in indica and 2,384 in japonica, distributed in 63 families (Gao et al. (2006) Bioinformatics 2006, 22(10):1286-7).

[0028] One of these families is the MYB domain family of transcription factors, characterized by a highly conserved DNA-binding domain, the MYB domain. The MYB domain was originally described in the oncogene (v-myb) of avian myeloblastosis virus (Klempnauer et al. (1982) Cell 33, 453-63). Many vertebrates contain three genes related to v-Myb c-Myb, A-Myb and B-Myb and other similar genes have been identified in insects, plants, fungi and slime molds. The encoded proteins are crucial to the control of proliferation and differentiation in a number of cell types. MYB proteins contain one to four imperfect direct repeats of a conserved sequence of 50-53 amino acids which encodes a helix-turn-helix structure involved in DNA binding (Rosinski and Atchley (1998) J Mol Evol 46, 74-83). Three regularly spaced tryptophan residues, which form a tryptophan cluster in the three-dimensional helix-turn-helix structure, are characteristic of a MYB repeat. The three repeats in c-Myb are referred to as R1, R2 and R3; and repeats from other MYB proteins are categorised according to their similarity to R1, R2 or R3. Since there is limited sequence conservation outside of the MYB domain, MYB proteins have been clustered into subgroups based on conserved motifs identified outside of the MYB coding region (Jiang et al. (2004) Genome Biology 5, R46).

[0029] AtMYB91 belongs to the R2R3-MYB gene family (Li and Parish, Plant J. 8, 963-972, 1995), which is a large gene family (with reportedly 126 genes in Arabidopsis thaliana (Zimmerman et al., Plant J. 40, 22-34, 2004)). Members of this group are involved in various processes, including secondary metabolism, cell morphogenesis, regulation of meristem formation, flower and seed development, cell cycle, defense and stress responses, light and hormone signalling (Chen et al., Cell Res. 16, 797-798, 2006). AtMYB91 is also named AS1 asymmetric leaves 1, and is closely related to Antirrhinum PHAN phantastica and to maize ROUGH SHEATH2 (RS2) polypeptides (Sun et al. (2002) Planta 214(5):694-702), all having an evolutionarily conserved role in specification of leaf cell identity, in particular in dorsal-ventral identity. In Arabidopsis, AS1 is expressed in leaf founder cells, where it functions as a heterodimer with the structurally unrelated AS2 proteins to repress activity of KNOTTED 1-like homeobox (KNOX) genes.

[0030] 3. Gibberellic Acid-Stimulated Arabidopsis (GASA)

[0031] GASA (Gibberellic Acid-Stimulated Arabidopsis) proteins are plant-specific and are expressed during a variety of physiological processes. Several GASA-like genes are hormone responsive, expression of tomato gene GAST1, the first member of the family to be characterized, was induced upon application of exogenous gibberellin in a gibberellin-deficient background (Shi et al. Plant J. 2, 153-159, 1992). A related tomato gene, RSI-1, shares high sequence identity with GAST1 and is activated during lateral root formation (Taylor and Scheuring, Mol. Gen. Genet. 243, 148-157, 1994). GASA1 to GASA4 from Arabidopsis were first identified based on their similarity to tomato GAST1 (Herzog et al. Plant Mol. Biol. 27, 743-752, 1995). Expression data indicated that GASA1 accumulates in flower buds and immature siliques, GASA2 and GASA3 in siliques and dry seeds, and GASA4 in growing roots and flower buds. GASA4 is reported to be expressed in all meristematic regions (Aubert et al., Plant Mol. Biol. 36, 871-883, 1998).

[0032] Functionally, the GASA proteins are not well characterised. GASA proteins are reportedly involved in pathogen responses and in plant development. Plants ectopically expressing GEG, a GASA homologue from Gerbera hybrida, showed shorter corollas with decreased cell length compared with the wild type, indicating a role for GEG as an inhibitor of cell elongation. Overexpression of Arabidopsis GASA4 resulted in plants having increased seed weight (Roxrud et al, Plant Cell Physiol. 48, 471-483, 2007). However, these plants in addition had occasional meristem identity changes with reconversion from floral meristems development to normal indeterminate inflorescence development. Furthermore, modulated GASA4 expression caused a significant increase of branching. Overexpression of Arabidopsis GASA4 also increased tolerance to heat stress (Ko et al., Plant Physiol. Biochem. 45, 722-728, 2007).

[0033] 4. Auxin/Indoleacetic Acid Genes (AUX/IAA)

[0034] The AUX/IAA (auxin/indoleacetic acid) genes encode a family of proteins whose expression is tightly regulated by auxin. The plant hormone auxin is involved in various processes like cell division, cell expansion and differentiation, patterning of embryos, vasculature or other tissues, regulation of growth of primary and lateral root or shoot meristems. AUX/IAA proteins furthermore are usually expressed in a tissue-specific manner.

[0035] AUX/IAA proteins typically have four conserved amino acid sequence motifs (domains I, II, III and IV) and have nuclear localisation signal sequences. Domains I and II are postulated to destabilize the protein and may be involved in protein turnover. Domains III and IV are postulated to be involved in protein-protein interactions: AUX/IAA proteins can form homodimers and are known to associate with ARF proteins. The AUX/IAA-ARF complexes are likely to be involved in auxin mediated gene expression. The Aux/IAA proteins are negative regulators of the auxin response factors (ARFs) that regulate expression of auxin-responsive genes. Aux/IAA proteins bind to the DNA-bound ARF partner proteins and repress ARF activity. In the auxin activated status, Aux/IAA proteins are ubiquitinated via interactions with the auxin-modified SCFTIR1complex and subsequently degraded by 26S proteasome action. An overview of roles and activities of AUX/IAA proteins is given by Reed (Trends in Plant Science 6, 420-425, 2001). The structure and expression analysis of early auxin-responsive Aux/IAA gene family in rice (Oryza sativa) has recently been reported by Jain et al. 2006 Funct Integr Genomics. 2006 January; 6(1):47-59.

[0036] IAA14 is a AUX/IAA protein that acts as a transcriptional repressor in lateral root formation. A gain of function mutation in IAA14 blocks early pericycle divisions that initiate lateral root development (Fukaki et al., Plant J. 29, 153-168, 2002).

### SUMMARY

### 1. Aspartate AminoTransferase (ASPAT)

[0037] Surprisingly, it has now been found that modulating expression of a nucleic acid encoding an ASPAT polypeptide gives plants having enhanced yield-related traits relative to control plants.

[0038] According one embodiment, there is provided a method for enhancing yield-related traits relative to control plants, comprising modulating expression of a nucleic acid encoding an ASPAT polypeptide in a plant.

### 2. MYB91 Like Transcription Factor (MYB91)

[0039] Surprisingly, it has now been found that increasing expression in a plant of a nucleic acid sequence encoding a MYB91 like transcription factor (MYB91) polypeptide as defined herein, gives plants having increased yield-related traits relative to control plants.

[0040] According to one embodiment, there is provided a method for increasing yield-related traits in plants relative to control plants, comprising increasing expression in a plant of a nucleic acid sequence encoding a MYB91 like transcription factor (MYB91) as defined herein. The increased yield-related traits comprise one or more of: increased plant height, increased harvest index (HI), and increased Thousand Kernel Weight (TKW).

### 3. Gibberellic Acid-Stimulated Arabidopsis (GASA)

[0041] Surprisingly, it has now been found that modulating expression of a nucleic acid encoding a GASA polypeptide gives plants having enhanced yield-related traits, in particular increased yield relative to control plants.

[0042] According one embodiment, there is provided a method for improving yield related traits of a plant, relative to control plants, comprising modulating expression of a nucleic acid encoding a GASA polypeptide in a plant.

### 4. Auxin/Indoleacetic Acid Genes (AUX/IAA)

[0043] Surprisingly, it has now been found that modulating expression of a nucleic acid encoding an AUX/IAA polypeptide gives plants having enhanced yield-related traits, in particular increased yield relative to control plants.

[0044] According one embodiment, there is provided a method for improving yield related traits of a plant relative to control plants, comprising modulating expression of a nucleic acid encoding an AUX/IAA polypeptide in a plant, wherein the yield related traits do not encompass increased root growth.

### DEFINITIONS

### Polypeptide(s)/Protein(s)

[0045] The terms “polypeptide” and “protein” are used interchangeably herein and refer to amino acids in a polymeric form of any length, linked together by peptide bonds.

### Polynucleotide(s)/Nucleic Acid(s)/Nucleic Acid Sequence(s)/Nucleotide Sequence(s)

[0046] The terms “polynucleotide(s)”, “nucleic acid sequence(s)”, “nucleotide sequence(s)”, “nucleic acid(s)”, “nucleic acid molecule” are used interchangeably herein and refer to nucleotides, either ribonucleotides or deoxyribonucleotides or a combination of both, in a polymeric unbranched form of any length.

### Control Plant(s)

[0047] The choice of suitable control plants is a routine part of an experimental setup and may include corresponding wild type plants or corresponding plants without the gene of interest. The control plant is typically of the same plant species or even of the same variety as the plant to be assessed. The control plant may also be a nullizygote of the plant to be assessed. Nullizygotes are individuals missing the transgene by segregation. A “control plant” as used herein refers not only to whole plants, but also to plant parts, including seeds and seed parts.

### Homologue(s)

[0048] “Homologues” of a protein encompass peptides, oligopeptides, polypeptides, proteins and enzymes having amino acid substitutions, deletions and/or insertions relative to the unmodified protein in question and having similar biological and functional activity as the unmodified protein from which they are derived.

[0049] A deletion refers to removal of one or more amino acids from a protein.

[0050] An insertion refers to one or more amino acid residues being introduced into a predetermined site in a protein. Insertions may comprise N-terminal and/or C-terminal fusions as well as intra-sequence insertions of single or multiple amino acids. Generally, insertions within the amino acid sequence will be smaller than N- or C-terminal fusions, of the order of about 1 to 10 residues. Examples of N- or C-terminal fusion proteins or peptides include the binding domain or activation domain of a transcriptional activator as used in the yeast two-hybrid system, phage coat proteins, (histidine)-6-tag, glutathione S-transferase-tag, protein A, maltose-binding protein, dihydrofolate reductase, Tag•100 epitope, c-myc epitope, FLAG®-epitope, lacZ, CMP (calmodulin-binding peptide), HA epitope, protein C epitope and VSV epitope.

[0051] A substitution refers to replacement of amino acids of the protein with other amino acids having similar properties (such as similar hydrophobicity, hydrophilicity, antigenicity, propensity to form or break α-helical structures or β-sheet structures). Amino acid substitutions are typically of single residues, but may be clustered depending upon functional constraints placed upon the polypeptide; insertions will usually be of the order of about 1 to 10 amino acid residues. The amino acid substitutions are preferably conservative amino acid substitutions. Conservative substitution tables are well known in the art (see for example Creighton (1984) Proteins. W.H. Freeman and Company (Eds) and Table 1 below).

TABLE 1
Examples of conserved amino acid substitutions

| Residue | Conservative Substitutions |
|---|---|
| Ala | Ser |
| Arg | Lys |
| Asn | Gln; His |
| Asp | Glu |
| Gln | Asn |
| Cys | Ser |
| Glu | Asp |
| Gly | Pro |
| His | Asn; Gln |
| Ile | Leu, Val |
| Leu | Ile; Val |
| Lys | Arg; Gln |
| Met | Leu; Ile |
| Phe | Met; Leu; Tyr |
| Ser | Thr; Gly |
| Thr | Ser; Val |
| Trp | Tyr |
| Tyr | Trp; Phe |
| Val | Ile; Leu |

[0052] Amino acid substitutions, deletions and/or insertions may readily be made using peptide synthetic techniques well known in the art, such as solid phase peptide synthesis and the like, or by recombinant DNA manipulation. Methods for the manipulation of DNA sequences to produce substitution, insertion or deletion variants of a protein are well known in the art. For example, techniques for making substitution mutations at predetermined sites in DNA are well known to those skilled in the art and include M13 mutagenesis, T7-Gen in vitro mutagenesis (USB, Cleveland, Ohio), QuickChange Site Directed mutagenesis (Stratagene, San Diego, Calif.), PCR-mediated site-directed mutagenesis or other site-directed mutagenesis protocols.

### Derivatives

[0053] “Derivatives” include peptides, oligopeptides, polypeptides which may, compared to the amino acid sequence of the naturally-occurring form of the protein, such as the protein of interest, comprise substitutions of amino acids with non-naturally occurring amino acid residues, or additions of non-naturally occurring amino acid residues. “Derivatives” of a protein also encompass peptides, oligopeptides, polypeptides which comprise naturally occurring altered (glycosylated, acylated, prenylated, phosphorylated, myristoylated, sulphated etc.) or non-naturally altered amino acid residues compared to the amino acid sequence of a naturally-occurring form of the polypeptide. A derivative may also comprise one or more non-amino acid substituents or additions compared to the amino acid sequence from which it is derived, for example a reporter molecule or other ligand, covalently or non-covalently bound to the amino acid sequence, such as a reporter molecule which is bound to facilitate its detection, and non-naturally occurring amino acid residues relative to the amino acid sequence of a naturally-occurring protein. Furthermore, “derivatives” also include fusions of the naturally-occurring form of the protein with tagging peptides such as FLAG, HIS6 or thioredoxin (for a review of tagging peptides, see Terpe, Appl. Microbiol. Biotechnol. 60, 523-533, 2003).

### Orthologue(s)/Paralogue(s)

[0054] Orthologues and paralogues encompass evolutionary concepts used to describe the ancestral relationships of genes. Paralogues are genes within the same species that have originated through duplication of an ancestral gene; orthologues are genes from different organisms that have originated through speciation, and are also derived from a common ancestral gene.

### Domain

[0055] The term “domain” refers to a set of amino acids conserved at specific positions along an alignment of sequences of evolutionarily related proteins. While amino acids at other positions can vary between homologues, amino acids that are highly conserved at specific positions indicate amino acids that are likely essential in the structure, stability or function of a protein. Identified by their high degree of conservation in aligned sequences of a family of protein homologues, they can be used as identifiers to determine if any polypeptide in question belongs to a previously identified polypeptide family.

Motif/Consensus sequence/Signature

[0056] The term “motif” or “consensus sequence” or “signature” refers to a short conserved region in the sequence of evolutionarily related proteins. Motifs are frequently highly conserved parts of domains, but may also include only part of the domain, or be located outside of conserved domain (if all of the amino acids of the motif fall outside of a defined domain).

### Hybridisation

[0057] The term “hybridisation” as defined herein is a process wherein substantially homologous complementary nucleotide sequences anneal to each other. The hybridisation process can occur entirely in solution, i.e. both complementary nucleic acids are in solution. The hybridisation process can also occur with one of the complementary nucleic acids immobilised to a matrix such as magnetic beads, Sepharose beads or any other resin.

[0058] The hybridisation process can furthermore occur with one of the complementary nucleic acids immobilised to a solid support such as a nitro-cellulose or nylon membrane or immobilised by e.g. photolithography to, for example, a siliceous glass support (the latter known as nucleic acid arrays or microarrays or as nucleic acid chips). In order to allow hybridisation to occur, the nucleic acid molecules are generally thermally or chemically denatured to melt a double strand into two single strands and/or to remove hairpins or other secondary structures from single stranded nucleic acids.

[0059] The term “stringency” refers to the conditions under which a hybridisation takes place. The stringency of hybridisation is influenced by conditions such as temperature, salt concentration, ionic strength and hybridisation buffer composition. Generally, low stringency conditions are selected to be about 30° C. lower than the thermal melting point (Tₘ) for the specific sequence at a defined ionic strength and pH. Medium stringency conditions are when the temperature is 20° C. below Tₘ, and high stringency conditions are when the temperature is 10° C. below Tₘ. High stringency hybridisation conditions are typically used for isolating hybridising sequences that have high sequence similarity to the target nucleic acid sequence. However, nucleic acids may deviate in sequence and still encode a substantially identical polypeptide, due to the degeneracy of the genetic code. Therefore medium stringency hybridisation conditions may sometimes be needed to identify such nucleic acid molecules.

[0060] The Tm is the temperature under defined ionic strength and pH, at which 50% of the target sequence hybridises to a perfectly matched probe. The Tₘ is dependent upon the solution conditions and the base composition and length of the probe. For example, longer sequences hybridise specifically at higher temperatures. The maximum rate of hybridisation is obtained from about 16° C. up to 32° C. below Tₘ. The presence of monovalent cations in the hybridisation solution reduce the electrostatic repulsion between the two nucleic acid strands thereby promoting hybrid formation; this effect is visible for sodium concentrations of up to 0.4M (for higher concentrations, this effect may be ignored). Formamide reduces the melting temperature of DNA-DNA and DNA-RNA duplexes with 0.6 to 0.7° C. for each percent formamide, and addition of 50% formamide allows hybridisation to be performed at 30 to 45° C., though the rate of hybridisation will be lowered. Base pair mismatches reduce the hybridisation rate and the thermal stability of the duplexes. On average and for large probes, the Tm decreases about 1° C. per % base mismatch. The Tm may be calculated using the following equations, depending on the types of hybrids:
[0061] 1) DNA-DNA hybrids (Meinkoth and Wahl, Anal. Biochem., 138: 267-284, 1984):
   [0062] Tₘ=81.5° C.+16.6×log₁₀[Na⁺]^{a}+0.41×%[G/C^{b}]−500×[L^{c}]⁻¹−0.61×% formamide
[0063] 2) DNA-RNA or RNA-RNA hybrids:
   [0064] Tm=79.8+18.5 (log₁₀[Na⁺]^{a})+0.58 (% G/C^{b})+11.8(% G/C^{b})²−820/L^{c}
[0065] 3) oligo-DNA or oligo-RNAs hybrids:
   [0066] For <20 nucleotides: Tₘ=2 (Iₙ)
   [0067] For 20-35 nucleotides: Tₘ=22+1.46 (Iₙ)
[0068] ^{a} or for other monovalent cation, but only accurate in the 0.01-0.4 M range.
[0069] ^{b} only accurate for % GC in the 30% to 75% range.
[0070] ^{c}L=length of duplex in base pairs.
[0071] ^{d} oligo, oligonucleotide; Iₙ, =effective length of primer=2×(no. of G/C)+(no. of NT).

[0072] Non-specific binding may be controlled using any one of a number of known techniques such as, for example, blocking the membrane with protein containing solutions, additions of heterologous RNA, DNA, and SDS to the hybridisation buffer, and treatment with Rnase. For non-homologous probes, a series of hybridizations may be performed by varying one of (i) progressively lowering the annealing temperature (for example from 68° C. to 42° C.) or (ii) progressively lowering the formamide concentration (for example from 50% to 0%). The skilled artisan is aware of various parameters which may be altered during hybridisation and which will either maintain or change the stringency conditions.

[0073] Besides the hybridisation conditions, specificity of hybridisation typically also depends on the function of post-hybridisation washes. To remove background resulting from non-specific hybridisation, samples are washed with dilute salt solutions. Critical factors of such washes include the ionic strength and temperature of the final wash solution: the lower the salt concentration and the higher the wash temperature, the higher the stringency of the wash. Wash conditions are typically performed at or below hybridisation stringency. A positive hybridisation gives a signal that is at least twice of that of the background. Generally, suitable stringent conditions for nucleic acid hybridisation assays or gene amplification detection procedures are as set forth above. More or less stringent conditions may also be selected. The skilled artisan is aware of various parameters which may be altered during washing and which will either maintain or change the stringency conditions.

[0074] For example, typical high stringency hybridisation conditions for DNA hybrids longer than 50 nucleotides encompass hybridisation at 65° C. in 1×SSC or at 42° C. in 1×SSC and 50% formamide, followed by washing at 65° C. in 0.3×SSC. Examples of medium stringency hybridisation conditions for DNA hybrids longer than 50 nucleotides encompass hybridisation at 50° C. in 4×SSC or at 40° C. in 6×SSC and 50% formamide, followed by washing at 50° C. in 2×SSC. The length of the hybrid is the anticipated length for the hybridising nucleic acid. When nucleic acids of known sequence are hybridised, the hybrid length may be determined by aligning the sequences and identifying the conserved regions described herein. 1×SSC is 0.15M NaCl and 15 mM sodium citrate; the hybridisation solution and wash solutions may additionally include 5×Denhardt's reagent, 0.5-1.0% SDS, 100 μg/ml denatured, fragmented salmon sperm DNA, 0.5% sodium pyrophosphate.

[0075] For the purposes of defining the level of stringency, reference can be made to Sambrook et al. (2001) Molecular Cloning: a laboratory manual, 3rd Edition, Cold Spring Harbor Laboratory Press, CSH, New York or to Current Protocols in Molecular Biology, John Wiley & Sons, N.Y. (1989 and yearly updates).

### Splice Variant

[0076] The term “splice variant” as used herein encompasses variants of a nucleic acid sequence in which selected introns and/or exons have been excised, replaced, displaced or added, or in which introns have been shortened or lengthened. Such variants will be ones in which the biological activity of the protein is substantially retained; this may be achieved by selectively retaining functional segments of the protein. Such splice variants may be found in nature or may be manmade. Methods for predicting and isolating such splice variants are well known in the art (see for example Foissac and Schiex (2005) BMC Bioinformatics 6: 25).

### Allelic Variant

[0077] Alleles or allelic variants are alternative forms of a given gene, located at the same chromosomal position. Allelic variants encompass Single Nucleotide Polymorphisms (SNPs), as well as Small Insertion/Deletion Polymorphisms (INDELs). The size of INDELs is usually less than 100 bp. SNPs and INDELs form the largest set of sequence variants in naturally occurring polymorphic strains of most organisms.

### Gene Shuffling/Directed Evolution

[0078] Gene shuffling or directed evolution consists of iterations of DNA shuffling followed by appropriate screening and/or selection to generate variants of nucleic acids or portions thereof encoding proteins having a modified biological activity (Castle et al., (2004) Science 304(5674): 1151-4; U.S. Pat. Nos. 5,811,238 and 6,395,547).

### Regulatory Element/Control Sequence/Promoter

[0079] The terms “regulatory element”, “control sequence” and “promoter” are all used interchangeably herein and are to be taken in a broad context to refer to regulatory nucleic acid sequences capable of effecting expression of the sequences to which they are ligated. The term “promoter” typically refers to a nucleic acid control sequence located upstream from the transcriptional start of a gene and which is involved in recognising and binding of RNA polymerase and other proteins, thereby directing transcription of an operably linked nucleic acid. Encompassed by the aforementioned terms are transcriptional regulatory sequences derived from a classical eukaryotic genomic gene (including the TATA box which is required for accurate transcription initiation, with or without a CCAAT box sequence) and additional regulatory elements (i.e. upstream activating sequences, enhancers and silencers) which alter gene expression in response to developmental and/or external stimuli, or in a tissue-specific manner. Also included within the term is a transcriptional regulatory sequence of a classical prokaryotic gene, in which case it may include a −35 box sequence and/or −10 box transcriptional regulatory sequences. The term “regulatory element” also encompasses a synthetic fusion molecule or derivative that confers, activates or enhances expression of a nucleic acid molecule in a cell, tissue or organ.

[0080] A “plant promoter” comprises regulatory elements, which mediate the expression of a coding sequence segment in plant cells. Accordingly, a plant promoter need not be of plant origin, but may originate from viruses or micro-organisms, for example from viruses which attack plant cells. The “plant promoter” can also originate from a plant cell, e.g. from the plant which is transformed with the nucleic acid sequence to be expressed in the inventive process and described herein. This also applies to other “plant” regulatory signals, such as “plant” terminators. The promoters upstream of the nucleotide sequences useful in the methods of the present invention can be modified by one or more nucleotide substitution(s), insertion(s) and/or deletion(s) without interfering with the functionality or activity of either the promoters, the open reading frame (ORF) or the 3′-regulatory region such as terminators or other 3′ regulatory regions which are located away from the ORF. It is furthermore possible that the activity of the promoters is increased by modification of their sequence, or that they are replaced completely by more active promoters, even promoters from heterologous organisms. For expression in plants, the nucleic acid molecule must, as described above, be linked operably to or comprise a suitable promoter which expresses the gene at the right point in time and with the required spatial expression pattern.

[0081] For the identification of functionally equivalent promoters, the promoter strength and/or expression pattern of a candidate promoter may be analysed for example by operably linking the promoter to a reporter gene and assaying the expression level and pattern of the reporter gene in various tissues of the plant. Suitable well-known reporter genes include for example beta-glucuronidase or beta-galactosidase. The promoter activity is assayed by measuring the enzymatic activity of the beta-glucuronidase or beta-galactosidase. The promoter strength and/or expression pattern may then be compared to that of a reference promoter (such as the one used in the methods of the present invention). Alternatively, promoter strength may be assayed by quantifying mRNA levels or by comparing mRNA levels of the nucleic acid used in the methods of the present invention, with mRNA levels of housekeeping genes such as 18S rRNA, using methods known in the art, such as Northern blotting with densitometric analysis of autoradiograms, quantitative real-time PCR or RT-PCR (Heid et al., 1996 Genome Methods 6: 986-994). Generally by “weak promoter” is intended a promoter that drives expression of a coding sequence at a low level. By “low level” is intended at levels of about 1/10,000 transcripts to about 1/100,000 transcripts, to about 1/500,0000 transcripts per cell. Conversely, a “strong promoter” drives expression of a coding sequence at high level, or at about 1/10 transcripts to about 1/100 transcripts to about 1/1000 transcripts per cell. Generally, by “medium strength promoter” is intended a promoter that drives expression of a coding sequence at a lower level than a strong promoter, in particular at a level that is in all instances below that obtained when under the control of a 35S CaMV promoter.

### Operably Linked

[0082] The term “operably linked” as used herein refers to a functional linkage between the promoter sequence and the gene of interest, such that the promoter sequence is able to initiate transcription of the gene of interest.

### Constitutive Promoter

[0083] A “constitutive promoter” refers to a promoter that is transcriptionally active during most, but not necessarily all, phases of growth and development and under most environmental conditions, in at least one cell, tissue or organ. Table 2a below gives examples of constitutive promoters.

TABLE 2a
Examples of constitutive promoters

| Gene Source | Reference |
|---|---|
| Actin | McElroy et al, Plant Cell, 2: 163-171, 1990 |
| HMGP | WO 2004/070039 |
| CAMV 35S | Odell et al, Nature, 313: 810-812, 1985 |
| CaMV 19S | Nilsson et al., Physiol. Plant. 100: 456-462, 1997 |
| GOS2 | de Pater et al, Plant J Nov; 2(6): 837-44, 1992, |
| | WO 2004/065596 |
| Ubiquitin | Christensen et al, Plant Mol. Biol. 18: 675-689, 1992 |
| Rice cyclophilin | Buchholz et al, Plant Mol Biol. 25(5): 837-43, 1994 |
| Maize H3 histone | Lepetit et al, Mol. Gen. Genet. 231: 276-285, 1992 |
| Alfalfa H3 | Wu et al. Plant Mol. Biol. 11: 641-649, 1988 |
| histone | |
| Actin 2 | An et al, Plant J. 10(1); 107-121, 1996 |
| 34S FMV | Sanger et al., Plant. Mol. Biol., 14, 1990: 433-443 |
| Rubisco small | U.S. Pat. No. 4,962,028 |
| subunit | |
| OCS | Leisner (1988) Proc Natl Acad Sci USA 85(5): 2553 |
| SAD1 | Jain et al., Crop Science, 39 (6), 1999: 1696 |
| SAD2 | Jain et al., Crop Science, 39 (6), 1999: 1696 |
| nos | Shaw et al. (1984) Nucleic Acids Res. |
| | 12(20): 7831-7846 |
| V-ATPase | WO 01/14572 |
| Super promoter | WO 95/14098 |
| G-box proteins | WO 94/12015 |

### Ubiquitous Promoter

[0084] A ubiquitous promoter is active in substantially all tissues or cells of an organism.

### Developmentally-Regulated Promoter

[0085] A developmentally-regulated promoter is active during certain developmental stages or in parts of the plant that undergo developmental changes.

### Inducible Promoter

[0086] An inducible promoter has induced or increased transcription initiation in response to a chemical (for a review see Gatz 1997, Annu. Rev. Plant Physiol. Plant Mol. Biol., 48:89-108), environmental or physical stimulus, or may be “stress-inducible”, i.e. activated when a plant is exposed to various stress conditions, or a “pathogen-inducible” i.e. activated when a plant is exposed to exposure to various pathogens.

### Organ-Specific/Tissue-Specific Promoter

[0087] An organ-specific or tissue-specific promoter is one that is capable of preferentially initiating transcription in certain organs or tissues, such as the leaves, roots, seed tissue etc. For example, a “root-specific promoter” is a promoter that is transcriptionally active predominantly in plant roots, substantially to the exclusion of any other parts of a plant, whilst still allowing for any leaky expression in these other plant parts. Promoters able to initiate transcription in certain cells only are referred to herein as “cell-specific”.

[0088] Examples of root-specific promoters are listed in Table 2b below:

TABLE 2b
Examples of root-specific promoters

| Gene Source | Reference |
|---|---|
| RCc3 | Plant Mol Biol. 1995 January; 27(2): 237-48 |
| Arabidopsis PHT1 | Kovama et al., 2005; Mudge et al. (2002, |
| | Plant J. 31: 341) |
| Medicago phosphate | Xiao et al., 2006 |
| transporter | |
| Arabidopsis Pyk10 | Nitz et al. (2001) Plant Sci 161 (2): 337-346 |
| root-expressible genes | Tingey et al., EMBO J. 6: 1, 1987. |
| tobacco auxin- | Van der Zaal et al., Plant Mol. Biol. 16, |
| inducible gene | 983, 1991. |
| β-tubulin | Oppenheimer, et al., Gene 63: 87, 1988. |
| tobacco root- | Conkling, et al., Plant Physiol. 93: 1203, 1990. |
| specific genes | |
| B. napus G1-3b gene | U.S. Pat. No. 5,401,836 |
| SbPRP1 | Suzuki et al., Plant Mol. Biol. 21: 109-119, |
| | 1993. |
| LRX1 | Baumberger et al. 2001, Genes & Dev. 15: 1128 |
| BTG-26 Brassica | US 20050044585 |
| napus | |
| LeAMT1 (tomato) | Lauter et al. (1996, PNAS 3: 8139) |
| The LeNRT1-1 | Lauter et al. (1996, PNAS 3: 8139) |
| (tomato) | |
| class I patatin | Liu et al., Plant Mol. Biol. 153: 386-395, 1991. |
| gene (potato) | |
| KDC1 (Daucus | Downey et al. (2000, J. Biol. Chem. 275: 39420) |
| carota) | |
| TobRB7 gene | W Song (1997) PhD Thesis, North Carolina State |
| | University, Raleigh, NC USA |
| OsRAB5a (rice) | Wang et al. 2002, Plant Sci. 163: 273 |
| ALF5 (Arabidopsis) | Diener et al. (2001, Plant Cell 13: 1625) |
| NRT2; 1Np (N. | Quesada et al. (1997, Plant Mol. Biol. 34: 265) |
| plumbaginifolia) | |

[0089] A seed-specific promoter is transcriptionally active predominantly in seed tissue, but not necessarily exclusively in seed tissue (in cases of leaky expression). The seed-specific promoter may be active during seed development and/or during germination. The seed specific promoter may be endosperm/aleurone/embryo specific. Examples of seed-specific promoters (endosperm/aleurone/embryo specific) are shown in Table 2c to Table 2f below. Further examples of seed-specific promoters are given in Qing Qu and Takaiwa (Plant Biotechnol. J. 2, 113-125, 2004), which disclosure is incorporated by reference herein as if fully set forth.

TABLE 2c
Examples of seed-specific promoters

| Gene source | Reference |
|---|---|
| seed-specific genes | Simon et al., Plant Mol. Biol. 5: 191, 1985; |
| | Scofield et al., J. Biol. Chem. 262: 12202, 1987.; |
| | Baszczynski et al., Plant Mol. Biol. 14: 633, 1990. |
| Brazil Nut albumin | Pearson et al., Plant Mol. Biol. 18: 235-245, 1992. |
| legumin | Ellis et al., Plant Mol. Biol. 10: 203-214, 1988. |
| glutelin (rice) | Takaiwa et al., Mol. Gen. Genet. 208: 15-22, 1986; |
| | Takaiwa et al., FEBS Letts. 221: 43-47, 1987. |
| zein | Matzke et al Plant Mol Biol, 14(3): 323-32 1990 |
| napA | Stalberg et al, Planta 199: 515-519, 1996. |
| wheat LMW and HMW | Mol Gen Genet 216: 81-90, 1989; NAR 17: 461-2, 1989 |
| glutenin-1 | |
| wheat SPA | Albani et al, Plant Cell, 9: 171-184, 1997 |
| wheat α, β, γ-gliadins | EMBO J. 3: 1409-15, 1984 |
| barley Itr1 promoter | Diaz et al. (1995) Mol Gen Genet 248(5): 592-8 |
| barley B1, C, D, hordein | Theor Appl Gen 98: 1253-62, 1999; Plant J 4: 343-55, |
| | 1993; Mol Gen Genet 250: 750-60, 1996 |
| barley DOF | Mena et al, The Plant Journal, 116(1): 53-62, 1998 |
| blz2 | EP99106056.7 |
| synthetic promoter | Vicente-Carbajosa et al., Plant J. 13: 629-640, 1998. |
| rice prolamin NRP33 | Wu et al, Plant Cell Physiology 39(8) 885-889, 1998 |
| rice a-globulin Glb-1 | Wu et al, Plant Cell Physiology 39(8) 885-889, 1998 |
| rice OSH1 | Sato et al, Proc. Natl. Acad. Sci. USA, 93: 8117-8122, |
| | 1996 |
| rice α-globulin REB/OHP-1 | Nakase et al. Plant Mol. Biol. 33: 513-522, 1997 |
| rice ADP-glucose pyrophos- | Trans Res 6: 157-68, 1997 |
| phorylase | |
| maize ESR gene family | Plant J 12: 235-46, 1997 |
| sorghum α-kafirin | DeRose et al., Plant Mol. Biol 32: 1029-35, 1996 |
| KNOX | Postma-Haarsma et al, Plant Mol. Biol. 39: 257-71, 1999 |
| rice oleosin | Wu et al, J. Biochem. 123: 386, 1998 |
| sunflower oleosin | Cummins et al., Plant Mol. Biol. 19: 873-876, 1992 |
| PRO0117, putative rice 40S | WO 2004/070039 |
| ribosomal protein | |
| PRO0136, rice alanine | unpublished |
| aminotransferase | |
| PRO0147, trypsin inhibitor | unpublished |
| ITR1 (barley) | |
| PRO0151, rice WSI18 | WO 2004/070039 |
| PRO0175, rice RAB21 | WO 2004/070039 |
| PRO005 | WO 2004/070039 |
| PRO0095 | WO 2004/070039 |
| α-amylase (Amy32b) | Lanahan et al, Plant Cell 4: 203-211, 1992; Skriver et al, |
| | Proc Natl Acad Sci USA 88: 7266-7270, 1991 |
| cathepsin β-like gene | Cejudo et al, Plant Mol Biol 20: 849-856, 1992 |
| Barley Ltp2 | Kalla et al., Plant J. 6: 849-60, 1994 |
| Chi26 | Leah et al., Plant J. 4: 579-89, 1994 |
| Maize B-Peru | Selinger et al., Genetics 149; 1125-38, 1998 |

TABLE 2d
examples of endosperm-specific promoters

| Gene source | Reference |
|---|---|
| glutelin (rice) | Takaiwa et al. (1986) Mol Gen Genet 208: 15-22; |
| | Takaiwa et al. (1987) FEBS Letts. 221: 43-47 |
| zein | Matzke et al., (1990) Plant Mol Biol 14(3): 323-32 |
| wheat LMW | Colot et al. (1989) Mol Gen Genet 216: 81-90, |
| and HMW | Anderson et al. (1989) NAR 17: 461-2 |
| glutenin-1 | |
| wheat SPA | Albani et al. (1997) Plant Cell 9: 171-184 |
| wheat gliadins | Rafalski et al. (1984) EMBO 3: 1409-15 |
| barley Itr1 | Diaz et al. (1995) Mol Gen Genet 248(5): 592-8 |
| promoter | |
| barley B1, C, D, | Cho et al. (1999) Theor Appl Genet 98: 1253-62; |
| hordein | Muller et al. (1993) Plant J 4: 343-55; |
| | Sorenson et al. (1996) Mol Gen Genet 250: 750-60 |
| barley DOF | Mena et al, (1998) Plant J 116(1): 53-62 |
| blz2 | Onate et al. (1999) J Biol Chem 274(14): 9175-82 |
| synthetic promoter | Vicente-Carbajosa et al. (1998) Plant J 13: 629-640 |
| rice prolamin | Wu et al, (1998) Plant Cell Physiol 39(8) 885-889 |
| NRP33 | |
| rice globulin | Wu et al. (1998) Plant Cell Physiol 39(8) 885-889 |
| Glb-1 | |
| rice globulin | Nakase et al. (1997) Plant Molec Biol 33: 513-522 |
| REB/OHP-1 | |
| rice ADP-glucose | Russell et al. (1997) Trans Res 6: 157-68 |
| pyrophosphorylase | |
| maize ESR | Opsahl-Ferstad et al. (1997) Plant J 12: 235-46 |
| gene family | |
| sorghum kafirin | DeRose et al. (1996) Plant Mol Biol 32: 1029-35 |

TABLE 2e
Examples of embryo specific promoters:

| Gene source | Reference |
|---|---|
| rice OSH1 | Sato et al, Proc. Natl. Acad. Sci. USA, 93: 8117-8122, |
| | 1996 |
| KNOX | Postma-Haarsma et al, Plant Mol. Biol. 39: 257-71, 1999 |
| PRO0151 | WO 2004/070039 |
| PRO0175 | WO 2004/070039 |
| PRO005 | WO 2004/070039 |
| PRO0095 | WO 2004/070039 |

TABLE 2f
Examples of aleurone-specific promoters:

| Gene source | Reference |
|---|---|
| α-amylase | Lanahan et al, Plant Cell 4: 203-211, 1992; |
| (Amy32b) | Skriver et al, Proc Natl Acad Sci USA 88: |
| | 7266-7270, 1991 |
| cathepsin β-like gene | Cejudo et al, Plant Mol Biol 20: 849-856, 1992 |
| Barley Ltp2 | Kalla et al., Plant J. 6: 849-60, 1994 |
| Chi26 | Leah et al., Plant J. 4: 579-89, 1994 |
| Maize B-Peru | Selinger et al., Genetics 149; 1125-38, 1998 |

[0090] A green tissue-specific promoter as defined herein is a promoter that is transcriptionally active predominantly in green tissue, substantially to the exclusion of any other parts of a plant, whilst still allowing for any leaky expression in these other plant parts.

[0091] Examples of green tissue-specific promoters which may be used to perform the methods of the invention are shown in Table 2g below.

TABLE 2g
Examples of green tissue-specific promoters

| Gene | Expression | Reference |
|---|---|---|
| Maize Orthophosphate dikinase | Leaf specific | Fukavama et al., 2001 |
| Maize Phosphoenolpyruvate | Leaf specific | Kausch et al., 2001 |
| carboxylase | | |
| Rice Phosphoenolpyruvate | Leaf specific | Liu et al., 2003 |
| carboxylase | | |
| Rice small subunit Rubisco | Leaf specific | Nomura et al., 2000 |
| rice beta expansin EXBP9 | Shoot specific | WO 2004/070039 |
| Pigeonpea small subunit Rubisco | Leaf specific | Panguluri et al., 2005 |
| Pea RBCS3A | Leaf specific | |

[0092] Another example of a tissue-specific promoter is a meristem-specific promoter, which is transcriptionally active predominantly in meristematic tissue, substantially to the exclusion of any other parts of a plant, whilst still allowing for any leaky expression in these other plant parts. Examples of green meristem-specific promoters which may be used to perform the methods of the invention are shown in Table 2h below.

TABLE 2h
Examples of meristem-specific promoters

| Gene source | Expression pattern | Reference |
|---|---|---|
| rice OSH1 | Shoot apical meristem, | Sato et al. (1996) |
| | from embryo globular stage | Proc. Natl. Acad. Sci. |
| | to seedling stage | USA, 93: 8117-8122 |
| Rice metallothionein | Meristem specific | BAD87835.1 |
| WAK1 & WAK2 | Shoot and root apical | Wagner & Kohorn |
| | meristems, and in | (2001) Plant Cell |
| | expanding leaves and | 13(2): 303-318 |
| | sepals | |

### Terminator

[0093] The term “terminator” encompasses a control sequence which is a DNA sequence at the end of a transcriptional unit which signals 3′ processing and polyadenylation of a primary transcript and termination of transcription. The terminator can be derived from the natural gene, from a variety of other plant genes, or from T-DNA. The terminator to be added may be derived from, for example, the nopaline synthase or octopine synthase genes, or alternatively from another plant gene, or less preferably from any other eukaryotic gene.

### Modulation

[0094] The term “modulation” means in relation to expression or gene expression, a process in which the expression level is changed by said gene expression in comparison to the control plant, the expression level may be increased or decreased. The original, unmodulated expression may be of any kind of expression of a structural RNA (rRNA, tRNA) or mRNA with subsequent translation. The term “modulating the activity” shall mean any change of the expression of the inventive nucleic acid sequences or encoded proteins, which leads to increased yield and/or increased growth of the plants.

### Expression

[0095] The term “expression” or “gene expression” means the transcription of a specific gene or specific genes or specific genetic construct. The term “expression” or “gene expression” in particular means the transcription of a gene or genes or genetic construct into structural RNA (rRNA, tRNA) or mRNA with or without subsequent translation of the latter into a protein. The process includes transcription of DNA and processing of the resulting mRNA product.

### Increased Expression/Overexpression

[0096] The term “increased expression” or “overexpression” as used herein means any form of expression that is additional to the original wild-type expression level.

[0097] Methods for increasing expression of genes or gene products are well documented in the art and include, for example, overexpression driven by appropriate promoters, the use of transcription enhancers or translation enhancers. Isolated nucleic acids which serve as promoter or enhancer elements may be introduced in an appropriate position (typically upstream) of a non-heterologous form of a polynucleotide so as to upregulate expression of a nucleic acid encoding the polypeptide of interest. For example, endogenous promoters may be altered in vivo by mutation, deletion, and/or substitution (see, Kmiec, U.S. Pat. No. 5,565,350; Zarling et al., WO9322443), or isolated promoters may be introduced into a plant cell in the proper orientation and distance from a gene of the present invention so as to control the expression of the gene.

[0098] If polypeptide expression is desired, it is generally desirable to include a polyadenylation region at the 3′-end of a polynucleotide coding region. The polyadenylation region can be derived from the natural gene, from a variety of other plant genes, or from T-DNA. The 3′ end sequence to be added may be derived from, for example, the nopaline synthase or octopine synthase genes, or alternatively from another plant gene, or less preferably from any other eukaryotic gene.

[0099] An intron sequence may also be added to the 5′ untranslated region (UTR) or the coding sequence of the partial coding sequence to increase the amount of the mature message that accumulates in the cytosol. Inclusion of a spliceable intron in the transcription unit in both plant and animal expression constructs has been shown to increase gene expression at both the mRNA and protein levels up to 1000-fold (Buchman and Berg (1988) Mol. Cell. biol. 8: 4395-4405; Callis et al. (1987) Genes Dev 1:1183-1200). Such intron enhancement of gene expression is typically greatest when placed near the 5′ end of the transcription unit. Use of the maize introns Adh1-S intron 1, 2, and 6, the Bronze-1 intron are known in the art. For general information see: The Maize Handbook, Chapter 116, Freeling and Walbot, Eds., Springer, N.Y. (1994).

### Endogenous Gene

[0100] Reference herein to an “endogenous” gene not only refers to the gene in question as found in a plant in its natural form (i.e., without there being any human intervention), but also refers to that same gene (or a substantially homologous nucleic acid/gene) in an isolated form subsequently (re)introduced into a plant (a transgene). For example, a transgenic plant containing such a transgene may encounter a substantial reduction of the transgene expression and/or substantial reduction of expression of the endogenous gene. The isolated gene may be isolated from an organism or may be manmade, for example by chemical synthesis.

### Decreased Expression

[0101] Reference herein to “decreased expression” or “reduction or substantial elimination” of expression is taken to mean a decrease in endogenous gene expression and/or polypeptide levels and/or polypeptide activity relative to control plants. The reduction or substantial elimination is in increasing order of preference at least 10%, 20%, 30%, 40% or 50%, 60%, 70%, 80%, 85%, 90%, or 95%, 96%, 97%, 98%, 99% or more reduced compared to that of control plants. Methods for decreasing expression are known in the art and the skilled person would readily be able to adapt the known methods for silencing so as to achieve reduction of expression of an endogenous gene in a whole plant or in parts thereof through the use of an appropriate promoter, for example.

[0102] For the reduction or substantial elimination of expression an endogenous gene in a plant, a sufficient length of substantially contiguous nucleotides of a nucleic acid sequence is required. In order to perform gene silencing, this may be as little as 20, 19, 18, 17, 16, 15, 14, 13, 12, 11, 10 or fewer nucleotides, alternatively this may be as much as the entire gene (including the 5′ and/or 3′ UTR, either in part or in whole). The stretch of substantially contiguous nucleotides may be derived from the nucleic acid encoding the protein of interest (target gene), or from any nucleic acid capable of encoding an orthologue, paralogue or homologue of the protein of interest. Preferably, the stretch of substantially contiguous nucleotides is capable of forming hydrogen bonds with the target gene (either sense or antisense strand), more preferably, the stretch of substantially contiguous nucleotides has, in increasing order of preference, 50%, 60%, 70%, 80%, 85%, 90%, 95%, 96%, 97%, 98%, 99%, 100% sequence identity to the target gene (either sense or antisense strand). A nucleic acid sequence encoding a (functional) polypeptide is not a requirement for the various methods discussed herein for the reduction or substantial elimination of expression of an endogenous gene.

[0103] Examples of various methods for the reduction or substantial elimination of expression in a plant of an endogenous gene, or for lowering levels and/or activity of a protein, are known to the skilled in the art. A skilled person would readily be able to adapt the known methods for silencing, so as to achieve reduction of expression of an endogenous gene in a whole plant or in parts thereof through the use of an appropriate promoter, for example.

[0104] This reduction or substantial elimination of expression may be achieved using routine tools and techniques. A preferred method for the reduction or substantial elimination of endogenous gene expression is by introducing and expressing in a plant a genetic construct into which the nucleic acid (in this case a stretch of substantially contiguous nucleotides derived from the gene of interest, or from any nucleic acid capable of encoding an orthologue, paralogue or homologue of any one of the protein of interest) is cloned as an inverted repeat (in part or completely), separated by a spacer (non-coding DNA).

[0105] In such a preferred method, expression of the endogenous gene is reduced or substantially eliminated through RNA-mediated silencing using an inverted repeat of a nucleic acid or a part thereof (in this case a stretch of substantially contiguous nucleotides derived from the gene of interest, or from any nucleic acid capable of encoding an orthologue, paralogue or homologue of the protein of interest), preferably capable of forming a hairpin structure. The inverted repeat is cloned in an expression vector comprising control sequences. A non-coding DNA nucleic acid sequence (a spacer, for example a matrix attachment region fragment (MAR), an intron, a polylinker, etc.) is located between the two inverted nucleic acids forming the inverted repeat. After transcription of the inverted repeat, a chimeric RNA with a self-complementary structure is formed (partial or complete). This double-stranded RNA structure is referred to as the hairpin RNA (hpRNA). The hpRNA is processed by the plant into siRNAs that are incorporated into an RNA-induced silencing complex (RISC). The RISC further cleaves the mRNA transcripts, thereby substantially reducing the number of mRNA transcripts to be translated into polypeptides. For further general details see for example, Grierson et al. (1998) WO 98/53083; Waterhouse et al. (1999) WO 99/53050).

[0106] Performance of the methods of the invention does not rely on introducing and expressing in a plant a genetic construct into which the nucleic acid is cloned as an inverted repeat, but any one or more of several well-known “gene silencing” methods may be used to achieve the same effects.

[0107] One such method for the reduction of endogenous gene expression is RNA-mediated silencing of gene expression (downregulation). Silencing in this case is triggered in a plant by a double stranded RNA sequence (dsRNA) that is substantially similar to the target endogenous gene. This dsRNA is further processed by the plant into about 20 to about 26 nucleotides called short interfering RNAs (siRNAs). The siRNAs are incorporated into an RNA-induced silencing complex (RISC) that cleaves the mRNA transcript of the endogenous target gene, thereby substantially reducing the number of mRNA transcripts to be translated into a polypeptide. Preferably, the double stranded RNA sequence corresponds to a target gene.

[0108] Another example of an RNA silencing method involves the introduction of nucleic acid sequences or parts thereof (in this case a stretch of substantially contiguous nucleotides derived from the gene of interest, or from any nucleic acid capable of encoding an orthologue, paralogue or homologue of the protein of interest) in a sense orientation into a plant. “Sense orientation” refers to a DNA sequence that is homologous to an mRNA transcript thereof. Introduced into a plant would therefore be at least one copy of the nucleic acid sequence. The additional nucleic acid sequence will reduce expression of the endogenous gene, giving rise to a phenomenon known as co-suppression. The reduction of gene expression will be more pronounced if several additional copies of a nucleic acid sequence are introduced into the plant, as there is a positive correlation between high transcript levels and the triggering of co-suppression.

[0109] Another example of an RNA silencing method involves the use of antisense nucleic acid sequences. An “antisense” nucleic acid sequence comprises a nucleotide sequence that is complementary to a “sense” nucleic acid sequence encoding a protein, i.e. complementary to the coding strand of a double-stranded cDNA molecule or complementary to an mRNA transcript sequence. The antisense nucleic acid sequence is preferably complementary to the endogenous gene to be silenced. The complementarity may be located in the “coding region” and/or in the “non-coding region” of a gene. The term “coding region” refers to a region of the nucleotide sequence comprising codons that are translated into amino acid residues. The term “non-coding region” refers to 5′ and 3′ sequences that flank the coding region that are transcribed but not translated into amino acids (also referred to as 5′ and 3′ untranslated regions).

[0110] Antisense nucleic acid sequences can be designed according to the rules of Watson and Crick base pairing. The antisense nucleic acid sequence may be complementary to the entire nucleic acid sequence (in this case a stretch of substantially contiguous nucleotides derived from the gene of interest, or from any nucleic acid capable of encoding an orthologue, paralogue or homologue of the protein of interest), but may also be an oligonucleotide that is antisense to only a part of the nucleic acid sequence (including the mRNA 5′ and 3′ UTR). For example, the antisense oligonucleotide sequence may be complementary to the region surrounding the translation start site of an mRNA transcript encoding a polypeptide. The length of a suitable antisense oligonucleotide sequence is known in the art and may start from about 50, 45, 40, 35, 30, 25, 20, 15 or 10 nucleotides in length or less. An antisense nucleic acid sequence according to the invention may be constructed using chemical synthesis and enzymatic ligation reactions using methods known in the art. For example, an antisense nucleic acid sequence (e.g., an antisense oligonucleotide sequence) may be chemically synthesized using naturally occurring nucleotides or variously modified nucleotides designed to increase the biological stability of the molecules or to increase the physical stability of the duplex formed between the antisense and sense nucleic acid sequences, e.g., phosphorothioate derivatives and acridine substituted nucleotides may be used. Examples of modified nucleotides that may be used to generate the antisense nucleic acid sequences are well known in the art. Known nucleotide modifications include methylation, cyclization and ‘caps’ and substitution of one or more of the naturally occurring nucleotides with an analogue such as inosine. Other modifications of nucleotides are well known in the art.

[0111] The antisense nucleic acid sequence can be produced biologically using an expression vector into which a nucleic acid sequence has been subcloned in an antisense orientation (i.e., RNA transcribed from the inserted nucleic acid will be of an antisense orientation to a target nucleic acid of interest). Preferably, production of antisense nucleic acid sequences in plants occurs by means of a stably integrated nucleic acid construct comprising a promoter, an operably linked antisense oligonucleotide, and a terminator.

[0112] The nucleic acid molecules used for silencing in the methods of the invention (whether introduced into a plant or generated in situ) hybridize with or bind to mRNA transcripts and/or genomic DNA encoding a polypeptide to thereby inhibit expression of the protein, e.g., by inhibiting transcription and/or translation. The hybridization can be by conventional nucleotide complementarity to form a stable duplex, or, for example, in the case of an antisense nucleic acid sequence which binds to DNA duplexes, through specific interactions in the major groove of the double helix. Antisense nucleic acid sequences may be introduced into a plant by transformation or direct injection at a specific tissue site. Alternatively, antisense nucleic acid sequences can be modified to target selected cells and then administered systemically. For example, for systemic administration, antisense nucleic acid sequences can be modified such that they specifically bind to receptors or antigens expressed on a selected cell surface, e.g., by linking the antisense nucleic acid sequence to peptides or antibodies which bind to cell surface receptors or antigens. The antisense nucleic acid sequences can also be delivered to cells using the vectors described herein.

[0113] According to a further aspect, the antisense nucleic acid sequence is an a-anomeric nucleic acid sequence. An a-anomeric nucleic acid sequence forms specific double-stranded hybrids with complementary RNA in which, contrary to the usual b-units, the strands run parallel to each other (Gaultier et al. (1987) Nucl Ac Res 15: 6625-6641). The antisense nucleic acid sequence may also comprise a 2′-o-methylribonucleotide (Inoue et al. (1987) Nucl Ac Res 15, 6131-6148) or a chimeric RNA-DNA analogue (Inoue et al. (1987) FEBS Lett. 215, 327-330).

[0114] The reduction or substantial elimination of endogenous gene expression may also be performed using ribozymes. Ribozymes are catalytic RNA molecules with ribonuclease activity that are capable of cleaving a single-stranded nucleic acid sequence, such as an mRNA, to which they have a complementary region. Thus, ribozymes (e.g., hammerhead ribozymes (described in Haselhoff and Gerlach (1988) Nature 334, 585-591) can be used to catalytically cleave mRNA transcripts encoding a polypeptide, thereby substantially reducing the number of mRNA transcripts to be translated into a polypeptide. A ribozyme having specificity for a nucleic acid sequence can be designed (see for example: Cech et al. U.S. Pat. No. 4,987,071; and Cech et al. U.S. Pat. No. 5,116,742). Alternatively, mRNA transcripts corresponding to a nucleic acid sequence can be used to select a catalytic RNA having a specific ribonuclease activity from a pool of RNA molecules (Bartel and Szostak (1993) Science 261, 1411-1418). The use of ribozymes for gene silencing in plants is known in the art (e.g., Atkins et al. (1994) WO 94/00012; Lenne et al. (1995) WO 95/03404; Lutziger et al. (2000) WO 00/00619; Prinsen et al. (1997) WO 97/13865 and Scott et al. (1997) WO 97/38116).

[0115] Gene silencing may also be achieved by insertion mutagenesis (for example, T-DNA insertion or transposon insertion) or by strategies as described by, among others, Angell and Baulcombe ((1999) Plant J 20(3): 357-62), (Amplicon VIGS WO 98/36083), or Baulcombe (WO 99/15682).

[0116] Gene silencing may also occur if there is a mutation on an endogenous gene and/or a mutation on an isolated gene/nucleic acid subsequently introduced into a plant. The reduction or substantial elimination may be caused by a non-functional polypeptide. For example, the polypeptide may bind to various interacting proteins; one or more mutation(s) and/or truncation(s) may therefore provide for a polypeptide that is still able to bind interacting proteins (such as receptor proteins) but that cannot exhibit its normal function (such as signalling ligand).

[0117] A further approach to gene silencing is by targeting nucleic acid sequences complementary to the regulatory region of the gene (e.g., the promoter and/or enhancers) to form triple helical structures that prevent transcription of the gene in target cells. See Helene, C., Anticancer Drug Res. 6, 569-84, 1991; Helene et al., Ann. N.Y. Acad. Sci. 660, 27-36 1992; and Maher, L. J. Bioassays 14, 807-15, 1992.

[0118] Other methods, such as the use of antibodies directed to an endogenous polypeptide for inhibiting its function in planta, or interference in the signalling pathway in which a polypeptide is involved, will be well known to the skilled man. In particular, it can be envisaged that manmade molecules may be useful for inhibiting the biological function of a target polypeptide, or for interfering with the signalling pathway in which the target polypeptide is involved.

[0119] Alternatively, a screening program may be set up to identify in a plant population natural variants of a gene, which variants encode polypeptides with reduced activity. Such natural variants may also be used for example, to perform homologous recombination.

[0120] Artificial and/or natural microRNAs (miRNAs) may be used to knock out gene expression and/or mRNA translation. Endogenous miRNAs are single stranded small RNAs of typically 19-24 nucleotides long. They function primarily to regulate gene expression and/or mRNA translation. Most plant microRNAs (miRNAs) have perfect or near-perfect complementarity with their target sequences. However, there are natural targets with up to five mismatches. They are processed from longer non-coding RNAs with characteristic fold-back structures by double-strand specific RNases of the Dicer family. Upon processing, they are incorporated in the RNA-induced silencing complex (RISC) by binding to its main component, an Argonaute protein. mRNAs serve as the specificity components of RISC, since they base-pair to target nucleic acids, mostly mRNAs, in the cytoplasm. Subsequent regulatory events include target mRNA cleavage and destruction and/or translational inhibition. Effects of miRNA overexpression are thus often reflected in decreased mRNA levels of target genes.

[0121] Artificial microRNAs (amiRNAs), which are typically 21 nucleotides in length, can be genetically engineered specifically to negatively regulate gene expression of single or multiple genes of interest. Determinants of plant microRNA target selection are well known in the art. Empirical parameters for target recognition have been defined and can be used to aid in the design of specific amiRNAs, (Schwab et al., Dev. Cell 8, 517-527, 2005). Convenient tools for design and generation of amiRNAs and their precursors are also available to the public (Schwab et al., Plant Cell 18, 1121-1133, 2006).

[0122] For optimal performance, the gene silencing techniques used for reducing expression in a plant of an endogenous gene requires the use of nucleic acid sequences from monocotyledonous plants for transformation of monocotyledonous plants, and from dicotyledonous plants for transformation of dicotyledonous plants. Preferably, a nucleic acid sequence from any given plant species is introduced into that same species. For example, a nucleic acid sequence from rice is transformed into a rice plant. However, it is not an absolute requirement that the nucleic acid sequence to be introduced originates from the same plant species as the plant in which it will be introduced. It is sufficient that there is substantial homology between the endogenous target gene and the nucleic acid to be introduced.

[0123] Described above are examples of various methods for the reduction or substantial elimination of expression in a plant of an endogenous gene. A person skilled in the art would readily be able to adapt the aforementioned methods for silencing so as to achieve reduction of expression of an endogenous gene in a whole plant or in parts thereof through the use of an appropriate promoter, for example.

### Selectable Marker (Gene)/Reporter Gene

[0124] “Selectable marker”, “selectable marker gene” or “reporter gene” includes any gene that confers a phenotype on a cell in which it is expressed to facilitate the identification and/or selection of cells that are transfected or transformed with a nucleic acid construct of the invention. These marker genes enable the identification of a successful transfer of the nucleic acid molecules via a series of different principles. Suitable markers may be selected from markers that confer antibiotic or herbicide resistance, that introduce a new metabolic trait or that allow visual selection. Examples of selectable marker genes include genes conferring resistance to antibiotics (such as nptII that phosphorylates neomycin and kanamycin, or hpt, phosphorylating hygromycin, or genes conferring resistance to, for example, bleomycin, streptomycin, tetracyclin, chloramphenicol, ampicillin, gentamycin, geneticin (G418), spectinomycin or blasticidin), to herbicides (for example bar which provides resistance to Basta®; aroA or gox providing resistance against glyphosate, or the genes conferring resistance to, for example, imidazolinone, phosphinothricin or sulfonylurea), or genes that provide a metabolic trait (such as manA that allows plants to use mannose as sole carbon source or xylose isomerase for the utilisation of xylose, or antinutritive markers such as the resistance to 2-deoxyglucose). Expression of visual marker genes results in the formation of colour (for example β-glucuronidase, GUS or β-galactosidasewith its coloured substrates, for example X-Gal), luminescence (such as the luciferin/luceferase system) or fluorescence (Green Fluorescent Protein, GFP, and derivatives thereof). This list represents only a small number of possible markers. The skilled worker is familiar with such markers. Different markers are preferred, depending on the organism and the selection method.

[0125] It is known that upon stable or transient integration of nucleic acids into plant cells, only a minority of the cells takes up the foreign DNA and, if desired, integrates it into its genome, depending on the expression vector used and the transfection technique used. To identify and select these integrants, a gene coding for a selectable marker (such as the ones described above) is usually introduced into the host cells together with the gene of interest. These markers can for example be used in mutants in which these genes are not functional by, for example, deletion by conventional methods. Furthermore, nucleic acid molecules encoding a selectable marker can be introduced into a host cell on the same vector that comprises the sequence encoding the polypeptides of the invention or used in the methods of the invention, or else in a separate vector. Cells which have been stably transfected with the introduced nucleic acid can be identified for example by selection (for example, cells which have integrated the selectable marker survive whereas the other cells die). The marker genes may be removed or excised from the transgenic cell once they are no longer needed. Techniques for marker gene removal are known in the art, useful techniques are described above in the definitions section.

[0126] Since the marker genes, particularly genes for resistance to antibiotics and herbicides, are no longer required or are undesired in the transgenic host cell once the nucleic acids have been introduced successfully, the process according to the invention for introducing the nucleic acids advantageously employs techniques which enable the removal or excision of these marker genes. One such a method is what is known as co-transformation. The co-transformation method employs two vectors simultaneously for the transformation, one vector bearing the nucleic acid according to the invention and a second bearing the marker gene(s). A large proportion of transformants receives or, in the case of plants, comprises (up to 40% or more of the transformants), both vectors. In case of transformation with Agrobacteria, the transformants usually receive only a part of the vector, i.e. the sequence flanked by the T-DNA, which usually represents the expression cassette. The marker genes can subsequently be removed from the transformed plant by performing crosses. In another method, marker genes integrated into a transposon are used for the transformation together with desired nucleic acid (known as the Ac/Ds technology). The transformants can be crossed with a transposase source or the transformants are transformed with a nucleic acid construct conferring expression of a transposase, transiently or stable. In some cases (approx. 10%), the transposon jumps out of the genome of the host cell once transformation has taken place successfully and is lost. In a further number of cases, the transposon jumps to a different location. In these cases the marker gene must be eliminated by performing crosses. In microbiology, techniques were developed which make possible, or facilitate, the detection of such events. A further advantageous method relies on what is known as recombination systems; whose advantage is that elimination by crossing can be dispensed with. The best-known system of this type is what is known as the Cre/lox system. Cre1 is a recombinase that removes the sequences located between the loxP sequences. If the marker gene is integrated between the loxP sequences, it is removed once transformation has taken place successfully, by expression of the recombinase. Further recombination systems are the HIN/HIX, FLP/FRT and REP/STB system (Tribble et al., J. Biol. Chem., 275, 2000: 22255-22267; Velmurugan et al., J. Cell Biol., 149, 2000: 553-566). A site-specific integration into the plant genome of the nucleic acid sequences according to the invention is possible. Naturally, these methods can also be applied to microorganisms such as yeast, fungi or bacteria.

### Transgenic/Transgene/Recombinant

[0127] For the purposes of the invention, “transgenic”, “transgene” or “recombinant” means with regard to, for example, a nucleic acid sequence, an expression cassette, gene construct or a vector comprising the nucleic acid sequence or an organism transformed with the nucleic acid sequences, expression cassettes or vectors according to the invention, all those constructions brought about by recombinant methods in which either
[0128] (a) the nucleic acid sequences encoding proteins useful in the methods of the invention, or
[0129] (b) genetic control sequence(s) which is operably linked with the nucleic acid sequence according to the invention, for example a promoter, or
[0130] (c) a) and b)
   are not located in their natural genetic environment or have been modified by recombinant methods, it being possible for the modification to take the form of, for example, a substitution, addition, deletion, inversion or insertion of one or more nucleotide residues. The natural genetic environment is understood as meaning the natural genomic or chromosomal locus in the original plant or the presence in a genomic library. In the case of a genomic library, the natural genetic environment of the nucleic acid sequence is preferably retained, at least in part. The environment flanks the nucleic acid sequence at least on one side and has a sequence length of at least 50 bp, preferably at least 500 bp, especially preferably at least 1000 bp, most preferably at least 5000 bp. A naturally occurring expression cassette—for example the naturally occurring combination of the natural promoter of the nucleic acid sequences with the corresponding nucleic acid sequence encoding a polypeptide useful in the methods of the present invention, as defined above—becomes a transgenic expression cassette when this expression cassette is modified by non-natural, synthetic (“artificial”) methods such as, for example, mutagenic treatment. Suitable methods are described, for example, in U.S. Pat. No. 5,565,350 or WO 00/15815.

[0131] A transgenic plant for the purposes of the invention is thus understood as meaning, as above, that the nucleic acids used in the method of the invention are not at their natural locus in the genome of said plant, it being possible for the nucleic acids to be expressed homologously or heterologously. However, as mentioned, transgenic also means that, while the nucleic acids according to the invention or used in the inventive method are at their natural position in the genome of a plant, the sequence has been modified with regard to the natural sequence, and/or that the regulatory sequences of the natural sequences have been modified. Transgenic is preferably understood as meaning the expression of the nucleic acids according to the invention at an unnatural locus in the genome, i.e. homologous or, preferably, heterologous expression of the nucleic acids takes place. Preferred transgenic plants are mentioned herein.

### Transformation

[0132] The term “introduction” or “transformation” as referred to herein encompasses the transfer of an exogenous polynucleotide into a host cell, irrespective of the method used for transfer. Plant tissue capable of subsequent clonal propagation, whether by organogenesis or embryogenesis, may be transformed with a genetic construct of the present invention and a whole plant regenerated there from. The particular tissue chosen will vary depending on the clonal propagation systems available for, and best suited to, the particular species being transformed. Exemplary tissue targets include leaf disks, pollen, embryos, cotyledons, hypocotyls, megagametophytes, callus tissue, existing meristematic tissue (e.g., apical meristem, axillary buds, and root meristems), and induced meristem tissue (e.g., cotyledon meristem and hypocotyl meristem). The polynucleotide may be transiently or stably introduced into a host cell and may be maintained non-integrated, for example, as a plasmid. Alternatively, it may be integrated into the host genome. The resulting transformed plant cell may then be used to regenerate a transformed plant in a manner known to persons skilled in the art.

[0133] The transfer of foreign genes into the genome of a plant is called transformation. Transformation of plant species is now a fairly routine technique. Advantageously, any of several transformation methods may be used to introduce the gene of interest into a suitable ancestor cell. The methods described for the transformation and regeneration of plants from plant tissues or plant cells may be utilized for transient or for stable transformation. Transformation methods include the use of liposomes, electroporation, chemicals that increase free DNA uptake, injection of the DNA directly into the plant, particle gun bombardment, transformation using viruses or pollen and microprojection. Methods may be selected from the calcium/polyethylene glycol method for protoplasts (Krens, F. A. et al., (1982) Nature 296, 72-74; Negrutiu I et al. (1987) Plant Mol Biol 8: 363-373); electroporation of protoplasts (Shillito R. D. et al. (1985) Bio/Technol 3, 1099-1102); microinjection into plant material (Crossway A et al., (1986) Mol. Gen. Genet. 202: 179-185); DNA or RNA-coated particle bombardment (Klein T M et al., (1987) Nature 327: 70) infection with (non-integrative) viruses and the like. Transgenic plants, including transgenic crop plants, are preferably produced via Agrobacterium-mediated transformation. An advantageous transformation method is the transformation in planta. To this end, it is possible, for example, to allow the agrobacteria to act on plant seeds or to inoculate the plant meristem with agrobacteria. It has proved particularly expedient in accordance with the invention to allow a suspension of transformed agrobacteria to act on the intact plant or at least on the flower primordia. The plant is subsequently grown on until the seeds of the treated plant are obtained (Clough and Bent, Plant J. (1998) 16, 735-743). Methods for Agrobacterium-mediated transformation of rice include well known methods for rice transformation, such as those described in any of the following: European patent application EP 1198985 A1, Aldemita and Hodges (Planta 199: 612-617, 1996); Chan et al. (Plant Mol Biol 22 (3): 491-506, 1993), Hiei et al. (Plant J 6 (2): 271-282, 1994), which disclosures are incorporated by reference herein as if fully set forth. In the case of corn transformation, the preferred method is as described in either Ishida et al. (Nat. Biotechnol 14(6): 745-50, 1996) or Frame et al. (Plant Physiol 129(1): 13-22, 2002), which disclosures are incorporated by reference herein as if fully set forth. Said methods are further described by way of example in B. Jenes et al., Techniques for Gene Transfer, in: Transgenic Plants, Vol. 1, Engineering and Utilization, eds. S. D. Kung and R. Wu, Academic Press (1993) 128-143 and in Potrykus Annu. Rev. Plant Physiol. Plant Molec. Biol. 42 (1991) 205-225). The nucleic acids or the construct to be expressed is preferably cloned into a vector, which is suitable for transforming Agrobacterium tumefaciens, for example pBin19 (Bevan et al., Nucl. Acids Res. 12 (1984) 8711). Agrobacteria transformed by such a vector can then be used in known manner for the transformation of plants, such as plants used as a model, like Arabidopsis (Arabidopsis thaliana is within the scope of the present invention not considered as a crop plant), or crop plants such as, by way of example, tobacco plants, for example by immersing bruised leaves or chopped leaves in an agrobacterial solution and then culturing them in suitable media. The transformation of plants by means of Agrobacterium tumefaciens is described, for example, by Höfgen and Willmitzer in Nucl. Acid Res. (1988) 16, 9877 or is known inter alia from F. F. White, Vectors for Gene Transfer in Higher Plants; in Transgenic Plants, Vol. 1, Engineering and Utilization, eds. S. D. Kung and R. Wu, Academic Press, 1993, pp. 15-38.

[0134] In addition to the transformation of somatic cells, which then have to be regenerated into intact plants, it is also possible to transform the cells of plant meristems and in particular those cells which develop into gametes. In this case, the transformed gametes follow the natural plant development, giving rise to transgenic plants. Thus, for example, seeds of Arabidopsis are treated with agrobacteria and seeds are obtained from the developing plants of which a certain proportion is transformed and thus transgenic [Feldman, K A and Marks M D (1987). Mol Gen Genet. 208:274-289; Feldmann K (1992). In: C Koncz, N-H Chua and J Shell, eds, Methods in Arabidopsis Research. Word Scientific, Singapore, pp. 274-289]. Alternative methods are based on the repeated removal of the inflorescences and incubation of the excision site in the center of the rosette with transformed agrobacteria, whereby transformed seeds can likewise be obtained at a later point in time (Chang (1994). Plant J. 5: 551-558; Katavic (1994). Mol Gen Genet, 245: 363-370). However, an especially effective method is the vacuum infiltration method with its modifications such as the “floral dip” method. In the case of vacuum infiltration of Arabidopsis, intact plants under reduced pressure are treated with an agrobacterial suspension [Bechthold, N (1993). C R Acad Sci Paris Life Sci, 316: 1194-1199], while in the case of the “floral dip” method the developing floral tissue is incubated briefly with a surfactant-treated agrobacterial suspension [Clough, S J and Bent AF (1998) The Plant J. 16, 735-743]. A certain proportion of transgenic seeds are harvested in both cases, and these seeds can be distinguished from non-transgenic seeds by growing under the above-described selective conditions. In addition the stable transformation of plastids is of advantages because plastids are inherited maternally is most crops reducing or eliminating the risk of transgene flow through pollen. The transformation of the chloroplast genome is generally achieved by a process which has been schematically displayed in Klaus et al., 2004 [Nature Biotechnology 22 (2), 225-229]. Briefly the sequences to be transformed are cloned together with a selectable marker gene between flanking sequences homologous to the chloroplast genome. These homologous flanking sequences direct site specific integration into the plastome. Plastidal transformation has been described for many different plant species and an overview is given in Bock (2001) Transgenic plastids in basic research and plant biotechnology. J Mol. Biol. 2001 Sep. 21; 312 (3):425-38 or Maliga, P (2003) Progress towards commercialization of plastid transformation technology. Trends Biotechnol. 21, 20-28. Further biotechnological progress has recently been reported in form of marker free plastid transformants, which can be produced by a transient co-integrated maker gene (Klaus et al., 2004, Nature Biotechnology 22(2), 225-229).

### T-DNA Activation Tagging

[0135] T-DNA activation tagging (Hayashi et al. Science (1992) 1350-1353), involves insertion of T-DNA, usually containing a promoter (may also be a translation enhancer or an intron), in the genomic region of the gene of interest or 10 kb up- or downstream of the coding region of a gene in a configuration such that the promoter directs expression of the targeted gene. Typically, regulation of expression of the targeted gene by its natural promoter is disrupted and the gene falls under the control of the newly introduced promoter. The promoter is typically embedded in a T-DNA. This T-DNA is randomly inserted into the plant genome, for example, through Agrobacterium infection and leads to modified expression of genes near the inserted T-DNA. The resulting transgenic plants show dominant phenotypes due to modified expression of genes close to the introduced promoter.

### TILLING

[0136] The term “TILLING” is an abbreviation of “Targeted Induced Local Lesions In Genomes” and refers to a mutagenesis technology useful to generate and/or identify nucleic acids encoding proteins with modified expression and/or activity. TILLING also allows selection of plants carrying such mutant variants. These mutant variants may exhibit modified expression, either in strength or in location or in timing (if the mutations affect the promoter for example). These mutant variants may exhibit higher activity than that exhibited by the gene in its natural form. TILLING combines high-density mutagenesis with high-throughput screening methods. The steps typically followed in TILLING are: (a) EMS mutagenesis (Redei G P and Koncz C (1992) In Methods in Arabidopsis Research, Koncz C, Chua N H, Schell J, eds. Singapore, World Scientific Publishing Co, pp. 16-82; Feldmann et al., (1994) In Meyerowitz E M, Somerville C R, eds, Arabidopsis. Cold Spring Harbor Laboratory Press, Cold Spring Harbor, N.Y., pp 137-172; Lightner J and Caspar T (1998) In J Martinez-Zapater, J Salinas, eds, Methods on Molecular Biology, Vol. 82. Humana Press, Totowa, N.J., pp 91-104); (b) DNA preparation and pooling of individuals; (c) PCR amplification of a region of interest; (d) denaturation and annealing to allow formation of heteroduplexes; (e) DHPLC, where the presence of a heteroduplex in a pool is detected as an extra peak in the chromatogram; (f) identification of the mutant individual; and (g) sequencing of the mutant PCR product. Methods for TILLING are well known in the art (McCallum et al., (2000) Nat Biotechnol 18: 455-457; reviewed by Stemple (2004) Nat Rev Genet. 5(2): 145-50).

### Homologous Recombination

[0137] Homologous recombination allows introduction in a genome of a selected nucleic acid at a defined selected position. Homologous recombination is a standard technology used routinely in biological sciences for lower organisms such as yeast or the moss Physcomitrella. Methods for performing homologous recombination in plants have been described not only for model plants (Offring a et al. (1990) EMBO J. 9(10): 3077-84) but also for crop plants, for example rice (Terada et al. (2002) Nat Biotech 20(10): 1030-4; lida and Terada (2004) Curr Opin Biotech 15(2): 132-8), and approaches exist that are generally applicable regardless of the target organism (Miller et al, Nature Biotechnol. 25, 778-785, 2007).

### Yield

[0138] The term “yield” in general means a measurable produce of economic value, typically related to a specified crop, to an area, and to a period of time. Individual plant parts directly contribute to yield based on their number, size and/or weight, or the actual yield is the yield per square meter for a crop and year, which is determined by dividing total production (includes both harvested and appraised production) by planted square meters. The term “yield” of a plant may relate to vegetative biomass (root and/or shoot biomass), to reproductive organs, and/or to propagules (such as seeds) of that plant.

### Early Vigour

[0139] “Early vigour” refers to active healthy well-balanced growth especially during early stages of plant growth, and may result from increased plant fitness due to, for example, the plants being better adapted to their environment (i.e. optimizing the use of energy resources and partitioning between shoot and root). Plants having early vigour also show increased seedling survival and a better establishment of the crop, which often results in highly uniform fields (with the crop growing in uniform manner, i.e. with the majority of plants reaching the various stages of development at substantially the same time), and often better and higher yield. Therefore, early vigour may be determined by measuring various factors, such as thousand kernel weight, percentage germination, percentage emergence, seedling growth, seedling height, root length, root and shoot biomass and many more.

### Increase/Improve/Enhance

[0140] The terms “increase”, “improve” or “enhance” are interchangeable and shall mean in the sense of the application at least a 3%, 4%, 5%, 6%, 7%, 8%, 9% or 10%, preferably at least 15% or 20%, more preferably 25%, 30%, 35% or 40% more yield and/or growth in comparison to control plants as defined herein.

### Seed Yield

[0141] Increased seed yield may manifest itself as one or more of the following: a) an increase in seed biomass (total seed weight) which may be on an individual seed basis and/or per plant and/or per square meter; b) increased number of flowers per plant; c) increased number of (filled) seeds; d) increased seed filling rate (which is expressed as the ratio between the number of filled seeds divided by the total number of seeds); e) increased harvest index, which is expressed as a ratio of the yield of harvestable parts, such as seeds, divided by the total biomass; and f) increased thousand kernel weight (TKW), and g) increased number of primary panicles, which is extrapolated from the number of filled seeds counted and their total weight. An increased TKW may result from an increased seed size and/or seed weight, and may also result from an increase in embryo and/or endosperm size.

[0142] An increase in seed yield may also be manifested as an increase in seed size and/or seed volume. Furthermore, an increase in seed yield may also manifest itself as an increase in seed area and/or seed length and/or seed width and/or seed perimeter. Increased seed yield may also result in modified architecture, or may occur because of modified architecture.

### Greenness Index

[0143] The “greenness index” as used herein is calculated from digital images of plants. For each pixel belonging to the plant object on the image, the ratio of the green value versus the red value (in the RGB model for encoding color) is calculated. The greenness index is expressed as the percentage of pixels for which the green-to-red ratio exceeds a given threshold. Under normal growth conditions, under salt stress growth conditions, and under reduced nutrient availability growth conditions, the greenness index of plants is measured in the last imaging before flowering. In contrast, under drought stress growth conditions, the greenness index of plants is measured in the first imaging after drought.

### Plant

[0144] The term “plant” as used herein encompasses whole plants, ancestors and progeny of the plants and plant parts, including seeds, shoots, stems, leaves, roots (including tubers), flowers, and tissues and organs, wherein each of the aforementioned comprise the gene/nucleic acid of interest. The term “plant” also encompasses plant cells, suspension cultures, callus tissue, embryos, meristematic regions, gametophytes, sporophytes, pollen and microspores, again wherein each of the aforementioned comprises the gene/nucleic acid of interest.

[0145] Plants that are particularly useful in the methods of the invention include all plants which belong to the superfamily Viridiplantae, in particular monocotyledonous and dicotyledonous plants including fodder or forage legumes, ornamental plants, food crops, trees or shrubs selected from the list comprising Acer spp., Actinidia spp., Abelmoschus spp., Agave sisalana, Agropyron spp., Agrostis stolonifera, Allium spp., Amaranthus spp., Ammophila arenaria, Ananas comosus, Annona spp., Apium graveolens, Arachis spp, Artocarpus spp., Asparagus officinalis, Avena spp. (e.g. Avena sativa, Avena fatua, Avena byzantina, Avena fatua var. sativa, Avena hybrida), Averrhoa carambola, Bambusa sp., Benincasa hispida, Bertholletia excelsea, Beta vulgaris, Brassica spp. (e.g. Brassica napus, Brassica rapa ssp. [canola, oilseed rape, turnip rape]), Cadaba farinosa, Camellia sinensis, Canna indica, Cannabis sativa, Capsicum spp., Carex elata, Carica papaya, Carissa macrocarpa, Carya spp., Carthamus tinctorius, Castanea spp., Ceiba pentandra, Cichorium endivia, Cinnamomum spp., Citrullus lanatus, Citrus spp., Cocos spp., Coffea spp., Colocasia esculenta, Cola spp., Corchorus sp., Coriandrum sativum, Corylus spp., Crataegus spp., Crocus sativus, Cucurbita spp., Cucumis spp., Cynara spp., Daucus carota, Desmodium spp., Dimocarpus longan, Dioscorea spp., Diospyros spp., Echinochloa spp., Elaeis (e.g. Elaeis guineensis, Elaeis oleifera), Eleusine coracana, Eragrostis tef, Erianthus sp., Eriobotrya japonica, Eucalyptus sp., Eugenia uniflora, Fagopyrum spp., Fagus spp., Festuca arundinacea, Ficus carica, Fortunella spp., Fragaria spp., Ginkgo biloba, Glycine spp. (e.g. Glycine max, Soja hispida or Soja max), Gossypium hirsutum, Helianthus spp. (e.g. Helianthus annuus), Hemerocallis fulva, Hibiscus spp., Hordeum spp. (e.g. Hordeum vulgare), Ipomoea batatas, Juglans spp., Lactuca sativa, Lathyrus spp., Lens culinaris, Linum usitatissimum, Litchi chinensis, Lotus spp., Luffa acutangula, Lupinus spp., Luzula sylvatica, Lycopersicon spp. (e.g. Lycopersicon esculentum, Lycopersicon lycopersicum, Lycopersicon pyriforme), Macrotyloma spp., Malus spp., Malpighia emarginata, Mammea americana, Mangifera indica, Manihot spp., Manilkara zapota, Medicago sativa, Melilotus spp., Mentha spp., Miscanthus sinensis, Momordica spp., Morus nigra, Musa spp., Nicotiana spp., Olea spp., Opuntia spp., Ornithopus spp., Oryza spp. (e.g. Oryza sativa, Oryza latifolia), Panicum miliaceum, Panicum virgatum, Passiflora edulis, Pastinaca sativa, Pennisetum sp., Persea spp., Petroselinum crispum, Phalaris arundinacea, Phaseolus spp., Phleum pratense, Phoenix spp., Phragmites australis, Physalis spp., Pinus spp., Pistacia vera, Pisum spp., Poa spp., Populus spp., Prosopis spp., Prunus spp., Psidium spp., Punica granatum, Pyrus communis, Quercus spp., Raphanus sativus, Rheum rhabarbarum, Ribes spp., Ricinus communis, Rubus spp., Saccharum spp., Salix sp., Sambucus spp., Secale cereale, Sesamum spp., Sinapis sp., Solanum spp. (e.g. Solanum tuberosum, Solanum integrifolium or Solanum lycopersicum), Sorghum bicolor, Spinacia spp., Syzygium spp., Tagetes spp., Tamarindus indica, Theobroma cacao, Trifolium spp., Tripsacum dactyloides, Triticale sp., Triticosecale rimpaui, Triticum spp. (e.g. Triticum aestivum, Triticum durum, Triticum turgidum, Triticum hybernum, Triticum macha, Triticum sativum, Triticum monococcum or Triticum vulgare), Tropaeolum minus, Tropaeolum majus, Vaccinium spp., Vicia spp., Vigna spp., Viola odorata, Vitis spp., Zea mays, Zizania palustris, Ziziphus spp., amongst others.

### DETAILED DESCRIPTION OF THE INVENTION

[0146] Surprisingly, it has now been found that modulating expression in a plant of a nucleic acid encoding an ASPAT polypeptide gives plants having enhanced yield-related traits relative to control plants. According to a first embodiment, the present invention provides a method for enhancing yield-related traits in plants relative to control plants, comprising modulating expression in a plant of a nucleic acid encoding an ASPAT polypeptide and optionally selecting for plants having enhanced yield-related traits.

[0147] Furthermore surprisingly, it has now been found that increasing expression in a plant of a nucleic acid sequence encoding an MYB91 polypeptide as defined herein, gives plants having increased yield-related traits relative to control plants. According to a further embodiment, the present invention provides a method for increasing yield-related traits in plants relative to control plants, comprising increasing expression in a plant of a nucleic acid sequence encoding an MYB91 polypeptide.

[0148] Even furthermore surprisingly, it has now been found that modulating expression in a plant of a nucleic acid encoding a GASA polypeptide gives plants having enhanced yield-related traits relative to control plants. According to a further embodiment, the present invention provides a method for enhancing yield-related traits in plants relative to control plants, comprising modulating expression in a plant of a nucleic acid encoding a GASA polypeptide.

[0149] Yet furthermore surprisingly, it has now been found that modulating expression in a plant of a nucleic acid encoding an AUX/IAA polypeptide gives plants having enhanced yield-related traits relative to control plants. According to a first embodiment, the present invention provides a method for enhancing yield-related traits in plants relative to control plants, comprising modulating expression in a plant of a nucleic acid encoding an AUX/IAA polypeptide and wherein the yield related traits do not encompass increased root growth.

[0150] Concerning ASPAT polypeptides, a preferred method for modulating (preferably, increasing) expression of a nucleic acid encoding an ASPAT polypeptide (ASPAT nucleic acid) is by introducing and expressing in a plant a nucleic acid encoding an ASPAT polypeptide. Preferably the increased expression of the ASPAT nucleic acid and/or the of the ASPAT polypeptide and/or ASPAT activity occurs in one or more subcellular compartments selected in increasing order of preference from the cytosol, the chloroplast, the peroxisomes, the glyoxisomes and the mitochondria of a plant cell.

[0151] Cytosolic levels of the ASPAT nucleic acid expression levels and/or ASPAT polypeptide and/or ASPAT activity may be increased for example by expressing an ASPAT nucleic acid encoding a cytosolic isoform. Alternatively, ASPAT nucleic acids encoding isoforms naturally expressed in an organelle of the plant cell may be expressed in the cytosol by removing the specific organelle targeting motifs. Similarly a naturally found cytosolic isoform may be expressed in a preferred organelle by fussing specific acid amino acid motifs encoding known specific subcellular targeting signals of such organelle. Tools and techniques to expresses a polypeptide in a preferred organelle of a plant cell are well known in the art.

[0152] Concerning MYB91 polypeptides, a preferred method for increasing expression in a plant of a nucleic acid sequence encoding an MYB91 polypeptide is by introducing and expressing in a plant a nucleic acid sequence encoding an MYB91 polypeptide.

[0153] Concerning GASA polypeptides, a preferred method for modulating (preferably, increasing) expression of a nucleic acid encoding a GASA polypeptide is by introducing and expressing in a plant a nucleic acid encoding a GASA polypeptide.

[0154] Concerning AUX/IAA polypeptides, a preferred method for modulating (preferably, increasing) expression of a nucleic acid encoding an AUX/IAA polypeptide is by introducing and expressing in a plant a nucleic acid encoding an AUX/IAA polypeptide.

[0155] Concerning ASPAT polypeptides, any reference hereinafter to a “protein useful in the methods of the invention” is taken to mean an ASPAT polypeptide as defined herein. Any reference hereinafter to a “nucleic acid useful in the methods of the invention” is taken to mean a nucleic acid capable of encoding such an ASPAT polypeptide. The nucleic acid to be introduced into a plant (and therefore useful in performing the methods of the invention) is any nucleic acid encoding the type of protein which will now be described, hereafter also named “ASPAT nucleic acid” or “ASPAT gene”.

[0156] Concerning MYB91 polypeptides, any reference hereinafter to a “protein useful in the methods of the invention” is taken to mean an MYB91 polypeptide as defined herein. Any reference hereinafter to a “nucleic acid sequence useful in the methods of the invention” is taken to mean a nucleic acid sequence capable of encoding such an MYB91 polypeptide. The nucleic acid sequence to be introduced into a plant (and therefore useful in performing the methods of the invention) is any nucleic acid sequence encoding the type of polypeptide, which will now be described, hereafter also named “MYB91 nucleic acid sequence” or “MYB91 gene”.

[0157] Concerning GASA polypeptides, any reference hereinafter to a “protein useful in the methods of the invention” is taken to mean a GASA polypeptide as defined herein. Any reference hereinafter to a “nucleic acid useful in the methods of the invention” is taken to mean a nucleic acid capable of encoding such a GASA polypeptide. The nucleic acid to be introduced into a plant (and therefore useful in performing the methods of the invention) is any nucleic acid encoding the type of protein which will now be described, hereafter also named “GASA nucleic acid” or “GASA gene”.

[0158] Concerning AUX/IAA polypeptides, any reference hereinafter to a “protein (or polypeptide) useful in the methods of the invention” is taken to mean an AUX/IAA polypeptide as defined herein. Any reference hereinafter to a “nucleic acid useful in the methods of the invention” is taken to mean a nucleic acid capable of encoding such an AUX/IAA polypeptide. The nucleic acid to be introduced into a plant (and therefore useful in performing the methods of the invention) is any nucleic acid encoding the type of protein which will now be described, hereafter also named “AUX/IAA nucleic acid” or “AUX/IAA gene”.

[0159] An “ASPAT polypeptide” as defined herein refers to any polypeptide comprising an

[0160] Aminotransferase, class I and II (Aminotran_{—}1_{—}2) domain (Interpro accession number: IPR004839; pfam accession number: PF00155), and optionally Aspartate Transaminase activity (EC. 2.6.1.1).

[0161] Preferably, an ASPAT polypeptide comprises an Aminotran_{—}1_{—}2 domain having in increasing order of preference at least 50%, 51%, 52%, 53%, 54%, 55%, 56%, 57%, 58%, 59%, 60%, 61%, 62%, 63%, 64%, 65%, 66%, 67%, 68%, 69%, 70%, 71%, 72%, 73%, 74%, 75%, 76%, 77%, 78%, 79%, 80%, 81%, 82%, 83%, 84%, 85%, 86%, 87%, 88%, 89%, 90%, 91%, 92%, 93%, 94%, 95%, 96%, 97%, 98%, 99% or 100% sequence identity to any of the Aminotran_{—}1_{—}2 domains as set forth in Tables D1, Table D2 and Table D3.

[0162] Preferably the ASPAT polypeptide comprises a motif having at least 50%, 51%, 52%, 53%, 54%, 55%, 56%, 57%, 58%, 59%, 60%, 61%, 62%, 63%, 64%, 65%, 66%, 67%, 68%, 69%, 70%, 71%, 72%, 73%, 74%, 75%, 76%, 77%, 78%, 79%, 80%, 81%, 82%, 83%, 84%, 85%, 86%, 87%, 88%, 89%, 90%, 91%, 92%, 93%, 94%, 95%, 96%, 97%, 98%, 99% or 100% to any one or more of the following motif:

| | |
|---|---|
| (i) | Motif 1 (SEQ ID NO: 207): NPTG; |
| (ii) | Motif 2 (SEQ ID NO: 208): IVLLHACAHNPTGVDPT; |
| (iii) | Motif 3 (SEQ ID NO: 209): SRLLILCSPSNPTGSVY; |

wherein any amino acid maybe substituted by a conserved amino acid.

[0163] Preferably, the homologue of an ASPAT polypeptide has in increasing order of preference at least 25%, 26%, 27%, 28%, 29%, 30%, 31%, 32%, 33%, 34%, 35%, 36%, 37%, 38%, 39%, 40%, 41%, 42%, 43%, 44%, 45%, 46%, 47%, 48%, 49%, 50%, 51%, 52%, 53%, 54%, 55%, 56%, 57%, 58%, 59%, 60%, 61%, 62%, 63%, 64%, 65%, 66%, 67%, 68%, 69%, 70%, 71%, 72%, 73%, 74%, 75%, 76%, 77%, 78%, 79%, 80%, 81%, 82%, 83%, 84%, 85%, 86%, 87%, 88%, 89%, 90%, 91%, 92%, 93%, 94%, 95%, 96%, 97%, 98%, 99% or 100% overall sequence identity to the amino acid of any of the polypeptides of Table A1, preferably to any of the polypeptides in phylogenetic class 1 of Table B1, more preferably to SEQ ID NO: 2, even more preferably to SEQ ID NO: 8, most preferably to SEQ ID NO: 6. In addition the homologue of an ASPAT protein preferably comprises an Aminotran_{—}1_{—}2 domain as described above. The sequence identity is determined using a global alignment algorithm, such as the Needleman Wunsch algorithm in the program GAP (GCG Wisconsin Package, Accelrys), preferably with default parameters and preferably with sequences of mature proteins (i.e. without taking into account secretion signals or transit peptides). Compared to overall sequence identity, the sequence identity will generally be higher when only conserved domains or motifs are considered.

[0164] Alternatively, an ASPAT polypeptide useful in the methods of the invention has an amino acid sequence which when used in the construction of a phylogenetic tree, such as the one depicted in FIG. 2 clusters in increasing order of preference with any of the polypeptides of phylogenetic class 1, class 2, class 3 and class 4 as set forth in table B1.

[0165] A “MYB91 polypeptide” as defined herein refers to any polypeptide comprising (i) in increasing order of preference at least 50%, 55%, 60%, 65%, 70%, 75%, 80%, 85%, 90%, 95%, 98%, 99% or more amino acid sequence identity to a MYB DNA binding domain with an InterPro accession number IPR014778, as represented by SEQ ID NO: 269; and (ii) in increasing order of preference at least 50%, 55%, 60%, 65%, 70%, 75%, 80%, 85%, 90%, 95%, 98%, 99% or more amino acid sequence identity to a MYB DNA binding domain with an InterPro accession number IPR014778, as represented by SEQ ID NO: 270; and (iii) in increasing order of preference at least 50%, 55%, 60%, 65%, 70%, 75%, 80%, 85%, 90%, 95%, 98%, 99% or more amino acid sequence identity to a Conserved Domain as represented by SEQ ID NO: 271.

[0166] Alternatively or additionally, a “MYB91 polypeptide” as defined herein refers to any polypeptide sequence having in increasing order of preference at least 50%, 55%, 60%, 65%, 70%, 75%, 80%, 85%, 90%, 95%, 98%, 99% or more amino acid sequence identity to a polypeptide as represented by SEQ ID NO: 221.

[0167] Alternatively or additionally, a “MYB91 polypeptide” as defined herein refers to any polypeptide having in increasing order of preference at least 50%, 55%, 60%, 65%, 70%, 75%, 80%, 85%, 90%, 95%, 98%, 99% or more amino acid sequence identity to any of the polypeptide sequences given in Table A2 herein.

[0168] Alternatively or additionally, a “MYB91 polypeptide” as defined herein refers to any polypeptide sequence which when used in the construction of a phylogenetic tree of MYB polypeptides, such as the one depicted in FIG. 4, clusters with the MYB91 group of polypeptides rather than with any other group.

[0169] A “GASA polypeptide” as defined herein refers to polypeptides comprising in their native form a secretion signal, the GASA domain PF02704 (Interpro IPR003854) and the following three motifs:

Motif 4, (SEQ ID NO: 277) comprising 4
conserved Cys residues:
CXXCCXXCX

[0170] Wherein X in position 2 can be any amino acid, but preferably one of N, K, M, G, L, I, Q; and wherein X in position 3 can be any amino acid, but preferably one of V, T, S, M, I, L, H, Y, K; and wherein X in position 6 can be any amino acid, but preferably one of Q, A, N, D, L, V, R, H, S, G, K, E, T; and wherein X in position 7 can be any amino acid, but preferably one of R, T, A, D, K, E, Q, S, W, C; and wherein X in position 9 can be any amino acid, but preferably one of N, K, R, H, S, G, A, Q, L, D.

Motif 5 (SEQ ID NO: 278):
CV(P/L)(P/K/Q/A/S/T)GXX(Q/G/A/S)

[0171] Wherein X in position 6 can be any amino acid, but preferably one of T, P, S, Y, V, N, F, L; and wherein X in position 7 can be any amino acid, but preferably one of G, Y, F, S, A, L, V.

[0172] Motifs 4 and 5 are adjacent to each other or are separated from each other by 1 amino acid.

Motif 6 (SEQ ID NO: 279):
CY(D/A/T/F/R/N)X(M/L/W/K)

[0173] Wherein X in position 4 can be any amino acid, but preferably one of Q, R, S, D, E, N, T, H.

[0174] However, the term GASA polypeptide as used in the present invention does not encompass GASA4 from Arabidopsis thaliana (SEQ ID NO: 295).

[0175] Preferably, the GASA polypeptide useful in the methods of the present invention comprises one or more of the following motifs:

Motif 7 (SEQ ID NO: 280):
(S/L/Y/K/S/A)C(G/K/M/I/N/L)(L/M/I/V/T/S)CCXXC
(N/G/A/K/R/H/S/D)

[0176] Wherein X on position 7 can be any amino acid, but preferably one of E, H, G, K, A, Q, S, R, T, N, D, L, V; and wherein X on position 8 can be any amino acid, but preferably one of E, D, K, Q, S, R, A, T, C.

Motif 8 (SEQ ID NO: 281):
CVP(T/S/P/A/K/Q)G(S/P/T)(G/Y/L/A/S/F)(S/A/G/Q)
(T/S/P/N/D)(R/K/T/Y/L/Q/E)(D/S/H/R/E/N)X(C/I)

[0177] Wherein X in position 12 can be any amino acid, but preferably one of E, H, T, A, S, L, V, K, M.

[0178] Preferably, motif 7 is immediately followed by motif 8 or is separated by 1 amino acid from motif 8.

Motif 9 (SEQ ID NO: 282):
(P/R/K/T)CY(R/D/T/F/A)(D/Q/R/N/S/T/H/E)(M/K/W/L)
(L/V/K/R/T/N/I)

[0179] Preferably, motif 8 is immediately followed by motif 9 or is separated by 1 amino acid from motif 9.

Motif 10 (SEQ ID NO: 283):
(K/T)(R/P/V/A)C(L/N/M/I)(F/T)(Y/F/L)C(N/L/Q)
(H/Y/K)CC(G/K/E/N/A/R)(W/R/K/T/S/A)C(Q/L/R)CV
(P/L)(P/S/K/A)G(Y/T/V/N/F/L)(V/Y/F)G
Motif 11 (SEQ ID NO: 284):
(N/H)K(G/D/E/Q/A)(C/E/T/S/F/A/V)(C/W)(S/P)CY(N/R)
(N/D)(W/L/M)(K/T/E)(T/K/E/N)(Q/K)
Motif 12 (SEQ ID NO: 285)
(N/R)(G/C)(S/K)(H/Q/A/N/K/G)(K/T)(G/S/Q/A/K)
(H/Y/F)(K/T/R/H)

[0180] Alternatively, the homologue of a GASA protein has in increasing order of preference at least 25%, 26%, 27%, 28%, 29%, 30%, 31%, 32%, 33%, 34%, 35%, 36%, 37%, 38%, 39%, 40%, 41%, 42%, 43%, 44%, 45%, 46%, 47%, 48%, 49%, 50%, 51%, 52%, 53%, 54%, 55%, 56%, 57%, 58%, 59%, 60%, 61%, 62%, 63%, 64%, 65%, 66%, 67%, 68%, 69%, 70%, 71%, 72%, 73%, 74%, 75%, 76%, 77%, 78%, 79%, 80%, 81%, 82%, 83%, 84%, 85%, 86%, 87%, 88%, 89%, 90%, 91%, 92%, 93%, 94%, 95%, 96%, 97%, 98%, or 99% overall sequence identity to the amino acid represented by SEQ ID NO: 276, provided that the homologous protein comprises the conserved motifs as outlined above. The overall sequence identity is determined using a global alignment algorithm, such as the Needleman Wunsch algorithm in the program GAP (GCG Wisconsin Package, Accelrys), preferably with default parameters and preferably with sequences of mature proteins (i.e. without taking into account secretion signals or transit peptides). Compared to overall sequence identity, the sequence identity will generally be higher when only conserved domains or motifs are considered.

[0181] Preferably, the polypeptide sequence which when used in the construction of a phylogenetic tree, such as the one depicted in FIG. 9, clusters with the group of GASA polypeptides comprising the amino acid sequence represented by SEQ ID NO: 276 (or SEQ ID NO: 291 or SEQ ID NO: 292) rather than with any other group. It should be noted that GASA4 from Arabidopsis thaliana (SEQ ID NO: 295) is excluded from the group of GASA proteins as defined in the present invention.

[0182] An “AUX/IAA polypeptide” as defined herein refers to any polypeptide comprising an AUX/IAA domain (PFAM accession number PF02309, InterPro entry IPR003311). An “AUX/IAA polypeptide” as defined herein does not comprise the motif represented by SEQ ID NO: 670: (K/N)(I/M/L)F(S/Y)(Q/G)L (IAA2 motif).

[0183] AUX/IAA polypeptides of the invention have equivalent amino acid structure and function as the AUX/IAA family of transcription factors and homologues thereof.

[0184] The structure and function of AUX/IAA domains are well known in the art. Typically they can be found in AUX/IAA transcription factors of plants. Members of the AUX/IAA family of transcription factors from plant origin are well known in the art. A compilation of AUX/IAA polypeptides as found in the viridiplantae kingdom can be found in dedicated databases such as the so called “plant transcription database (PInTFDB)” maintained by the university of Postdam (Germany) and described by Riano-Pacho et al. BMC Bioinformatics 2007 8:47.

[0185] In the PInTFDB database the members of the AUX/IAA family are identified as polypeptides having a AUX/IAA domain (PFAM accession number: PF02309) and not having an Auxin_resp domain (pfam accession number: PF06507); Auxin_resp domains are typically found in ARF polypeptides and typically absent from AUX/IAA polypeptides.

[0186] An Example of an AUX/IAA domain as found between amino acid coordinates 5-171 of SEQ ID NO: 432. AUX/IAA domains having sequence similarity to the domain as present in SEQ ID NO: 432 are present in the polypeptides of Table A4.

[0187] In a one embodiment of the invention, to perform the methods of the invention there is provided a preferred an AUX/IAA polypeptide, also referred to as IAA14-like polypeptide, which comprises an AUX/IAA domain having at least 90%, 91%, 92%, 93%, 94%, 95%, 96%, 97%, 98%, or 99% sequence identity to the amino acid of the AUX/IAA domain represented by the amino acids 1 to 220 in SEQ ID NO: 738 (FIG. 13).

[0188] Preferably the IAA14-like polypeptide comprises at least one, and in increasing order of preference, 2, 3, 4, 5, or all six of the following motifs:

Motif 13, SEQ ID NO: 739:
(K/R/E/D)(A/E/D)TEL(C/R)LG(L/I)(P/G)
Motif 14, SEQ ID NO: 740:
KRGF(S/A)ET
Motif 15, SEQ ID NO: 741:
VGWPP(V/I)R
Motif 16, SEQ ID NO: 742:
GAPYLRK(V/I)DLXX(Y/F)

wherein X on position 11 can be any amino acid, preferably X on position 11 is one of K, T, R, N, S, or Q and wherein X on position 12 can be any amino acid, preferably X on position 12 is one of N, L, T, N, V, I, or C.

Motif 17, SEQ ID NO: 743:
(S/N/G)(S/W/T)(E/D/G)(Y/F/H)(V/A/E)(P/L/V/I)
(S/T/A)YEDKD(N/G)D(W/L)M(L/F)(V/I)GDVP
Motif 18, SEQ ID NO: 744:
(S/T)C(K/R/Q)(R/K)(L/I)R(I/L)(M/I)K(G/S/E)(S/K/T)
(E/D)(A/T)
Preferably motif 15 is:
VGWPPVR
Motif 16 is preferably:
GAPYLRK(V/I)DL(K/T/R/N)(M/L)Y
Motif 17 is preferably:
(S/N/G)(S/W/T)(E/D)YVP(S/T)YEDKDNDWM(L/F)VGDVP
Motif 18 is preferably:
(S/T)CK(R/K)(L/I)R(I/L)MK(G/S)(S/K/T)EA

[0189] Preferably the AUX/IAA polypeptide of the invention has in increasing order of preference at least 25%, 26%, 27%, 28%, 29%, 30%, 31%, 32%, 33%, 34%, 35%, 36%, 37%, 38%, 39%, 40%, 41%, 42%, 43%, 44%, 45%, 46%, 47%, 48%, 49%, 50%, 51%, 52%, 53%, 54%, 55%, 56%, 57%, 58%, 59%, 60%, 61%, 62%, 63%, 64%, 65%, 66%, 67%, 68%, 69%, 70%, 71%, 72%, 73%, 74%, 75%, 76%, 77%, 78%, 79%, 80%, 81%, 82%, 83%, 84%, 85%, 86%, 87%, 88%, 89%, 90%, 91%, 92%, 93%, 94%, 95%, 96%, 97%, 98%, or 99% sequence identity to the amino acid of an AUX/IAA domain, preferably to the AUX/IAA domain of any of the polypeptides of Table A4, most preferably to the AUX/IAA domain of SEQ ID NO: 432 as represented by the amino acids located between amino acid coordinates 5 to 171.

[0190] Preferably, the IAA14-like polypeptide sequence which when used in the construction of a phylogenetic tree, as depicted in FIG. 1 in Remington et al. (Plant Physiol. 135, 1738-1752, 2004), clusters with group A of the IAA14-like polypeptides, which comprises the amino acid sequence represented by SEQ ID NO: 738, rather than with any other group (see also FIG. 15).

[0191] Alternatively, the homologue of an AUX/IAA protein has in increasing order of preference at least 25%, 26%, 27%, 28%, 29%, 30%, 31%, 32%, 33%, 34%, 35%, 36%, 37%, 38%, 39%, 40%, 41%, 42%, 43%, 44%, 45%, 46%, 47%, 48%, 49%, 50%, 51%, 52%, 53%, 54%, 55%, 56%, 57%, 58%, 59%, 60%, 61%, 62%, 63%, 64%, 65%, 66%, 67%, 68%, 69%, 70%, 71%, 72%, 73%, 74%, 75%, 76%, 77%, 78%, 79%, 80%, 81%, 82%, 83%, 84%, 85%, 86%, 87%, 88%, 89%, 90%, 91%, 92%, 93%, 94%, 95%, 96%, 97%, 98%, or 99% overall sequence identity to the amino acid represented by any of the polypeptides of Table A4 or Table A5 preferably by SEQ ID NO: 432 or SEQ ID NO: 738, provided that the homologous protein comprises one or more of the conserved motifs as outlined above. The overall sequence identity is determined using a global alignment algorithm, such as the Needleman Wunsch algorithm in the program GAP (GCG Wisconsin Package, Accelrys), preferably with default parameters and preferably with sequences of mature proteins (i.e. without taking into account secretion signals or transit peptides). Compared to overall sequence identity, the sequence identity will generally be higher when only conserved domains or motifs are considered.

[0192] In a preferred embodiment, the polypeptide sequence which when used in the construction of a phylogenetic tree, as depicted in FIG. 1 in Remington et al. (Plant Physiol. 135, 1738-1752, 2004), clusters with group A of the IAA14-like polypeptides, which comprises the amino acid sequence represented by SEQ ID NO: 738, rather than with any other group (see also FIG. 15).

[0193] The terms “domain”, “signature” and “motif” are defined in the “definitions” section herein. Specialist databases exist for the identification of domains, for example, SMART (Schultz et al. (1998) Proc. Natl. Acad. Sci. USA 95, 5857-5864; Letunic et al. (2002) Nucleic Acids Res 30, 242-244), InterPro (Mulder et al., (2003) Nucl. Acids. Res. 31, 315-318), Prosite (Bucher and Bairoch (1994), A generalized profile syntax for biomolecular sequences motifs and its function in automatic sequence interpretation. (In) ISMB-94; Proceedings 2nd International Conference on Intelligent Systems for Molecular Biology. Altman R., Brutlag D., Karp P., Lathrop R., Searls D., Eds., pp 53-61, AAAI Press, Menlo Park; Hulo et al., Nucl. Acids. Res. 32:D134-D137, (2004)), or Pfam (Bateman et al., Nucleic Acids Research 30(1): 276-280 (2002)). A set of tools for in silico analysis of protein sequences is available on the ExPASy proteomics server (Swiss Institute of Bioinformatics (Gasteiger et al., ExPASy: the proteomics server for in-depth protein knowledge and analysis, Nucleic Acids Res. 31:3784-3788 (2003)). Domains or motifs may also be identified using routine techniques, such as by sequence alignment.

[0194] Concerning MYB91 polypeptides, an alignment of the polypeptides of Table A2 herein, is shown in FIG. 5. Such alignments are useful for identifying the most conserved domains or motifs between the MYB91 polypeptides as defined herein. Examples of such domains are (i) a MYB DNA binding domain with an InterPro accession number IPR014778, as represented by SEQ ID NO: 269 and/or by SEQ ID NO: 270 (marked by X's in FIG. 5); and (ii) a MYB DNA transcription factor with an InterPro entry IPR015495 (also marked by X's in FIG. 2). Another such domain is a C-terminal Conserved Domain as represented by SEQ ID NO: 271, also marked by X's in FIG. 5.

[0195] Methods for the alignment of sequences for comparison are well known in the art, such methods include GAP, BESTFIT, BLAST, FASTA and TFASTA. GAP uses the algorithm of Needleman and Wunsch ((1970) J Mol Biol 48: 443-453) to find the global (i.e. spanning the complete sequences) alignment of two sequences that maximizes the number of matches and minimizes the number of gaps. The BLAST algorithm (Altschul et al. (1990) J Mol Biol 215: 403-10) calculates percent sequence identity and performs a statistical analysis of the similarity between the two sequences. The software for performing BLAST analysis is publicly available through the National Centre for Biotechnology Information (NCBI). Homologues may readily be identified using, for example, the ClustalW multiple sequence alignment algorithm (version 1.83), with the default pairwise alignment parameters, and a scoring method in percentage. Global percentages of similarity and identity may also be determined using one of the methods available in the MatGAT software package (Campanella et al., BMC Bioinformatics. 2003 Jul. 10; 4:29. MatGAT: an application that generates similarity/identity matrices using protein or DNA sequences.). Minor manual editing may be performed to optimise alignment between conserved motifs, as would be apparent to a person skilled in the art. Furthermore, instead of using full-length sequences for the identification of homologues, specific domains may also be used. The sequence identity values may be determined over the entire nucleic acid or amino acid sequence or over selected domains or conserved motif(s), using the programs mentioned above using the default parameters. For local alignments, the Smith-Waterman algorithm is particularly useful (Smith T F, Waterman M S (1981) J. Mol. Biol. 147(1); 195-7).

[0196] Concerning MYB91 polypeptides, example 3 herein describes in Table B the percentage identity between the MYB91 polypeptide as represented by SEQ ID NO: 221 and the MYB91 polypeptides listed in Table A2, which can be as low as 52% amino acid sequence identity. In some instances, the default parameters may be adjusted to modify the stringency of the search. For example using BLAST, the statistical significance threshold (called “expect” value) for reporting matches against database sequences may be increased to show less stringent matches. This way, short nearly exact matches may be identified.

[0197] Concerning GASA polypeptides, an alignment can for example be made from the mature protein sequences, that is, without secretion signal peptide. Methods for identifying signal peptides are well known in the art, see for example Bendtsen et al., J. Mol. Biol., 340:783-795 (2004).

[0198] The task of protein subcellular localisation prediction is important and well studied. Knowing a protein's localisation helps elucidate its function. Experimental methods for protein localization range from immunolocalization to tagging of proteins using green fluorescent protein (GFP) or beta-glucuronidase (GUS). Such methods are accurate although labor-intensive compared with computational methods. Recently much progress has been made in computational prediction of protein localisation from sequence data. Among algorithms well known to a person skilled in the art are available at the ExPASy Proteomics tools hosted by the Swiss Institute for Bioinformatics, for example, PSort, TargetP, ChloroP, LocTree, Predotar, LipoP, MITOPROT, PATS, PTS1, SignalP, TMHMM, and others. By applying the PSort algorithm to an MYB91 polypeptide as represented by SEQ ID NO: 221, a predicted nuclear subcellular localisation is obtained.

[0199] Furthermore, ASPAT polypeptides typically have Aspartate Transaminase also called Aspartate Transferase activity. Tools and techniques for measuring Aspartate Transaminase activity are well known in the art. Aspartate Transaminase activity may be for example assayed in vivo by complementation of E. coli strains defective in the activity as described by De la Torre et al. 2006. Alternatively, a biochemical determination of Aspartate Transferase activity may be carried out as for example described in De la Torre et al. 2006.

[0200] In addition, ASPAT polypeptides, when expressed in rice according to the methods of the present invention as outlined in the Examples section, give plants having increased yield related traits, in particular increased seed yield.

[0201] GASA polypeptides, when expressed in rice according to the methods of the present invention as outlined in the examples section, give plants having increased yield related traits, in particular increased total weight of seeds and/or increased number of filled seeds, and/or increased harvest index.

[0202] Furthermore, transgenic plants expressing GASA polypeptides (at least in their native form) may have enhanced tolerance to heat stress (Ko et al, 2007). Tools and techniques for measuring resistance of plants to heat stress are well known in the art, see for example the methods described in Ko et al., 2007.

[0203] Furthermore, AUX/IAA polypeptides (at least in their native form) typically have protein binding activity: AUX/IAA polypeptides bind to ARF (Auxin Response Factor) polypeptides. Tools and techniques for measuring protein binding activity are well known in the art and include for example, immuno precipitation of protein complexes and yeast two hybrid. Tools and techniques for measuring the association of AUX/IAA and ARF polypeptide are well known in the art., and include for example yeast two hybrid analysis (see for example Fukaki et al. (Plant J. 44, 382-395, 2005).

[0204] Typically AUX/IAA polypeptides of the invention comprise an EAR domain (Ohata et al; Plant Cell. 2001 13(8):1959-68), which is a well known protein domain that typically confers repression activity to the transcription factors that comprising such domain. The AUX/IAA polypeptides of the invention have preferably transcription repression activity.

[0205] Concerning IAA14-like polypeptides, they (at least in their native form) typically associate with ARF7 or ARF19 proteins. Tools and techniques for measuring this association are well known in the art., and include for example yeast two hybrid analysis (see for example Fukaki et al. (Plant J. 44, 382-395, 2005) Further details are provided in the Examples section.

[0206] In addition, AUX/IAA polypeptides, when expressed in rice according to the methods of the present invention as outlined in the Examples section, give plants having increased yield related traits selected form increased harvest index, increased root biomass, increased green biomass and increased seed yield.

[0207] In addition, AUX/IAA polypeptides, when expressed in rice according to the methods of the present invention as outlined in the Examples section, give plants having increased yield related traits such as increase seed fill rate and increased harvest index.

[0208] In addition, IAA14-like polypeptides, when expressed in rice according to the methods of the present invention as outlined in the Examples section, give plants having increased yield related traits, preferably increased seed yield.

[0209] Additionally, AUX/IAA polypeptides may display a preferred subcellular localization, typically one or more of nuclear, citoplasmic, chloroplastic, or mitochondrial. The task of protein subcellular localisation prediction is important and well studied. Knowing a protein's localisation helps elucidate its function. Experimental methods for protein localization range from immunolocalization to tagging of proteins using green fluorescent protein (GFP) or beta-glucuronidase (GUS). Such methods are accurate although labor-intensive compared with computational methods. Recently much progress has been made in computational prediction of protein localisation from sequence data. Among algorithms well known to a person skilled in the art are available at the ExPASy Proteomics tools hosted by the Swiss Institute for Bioinformatics, for example, PSort, TargetP, ChloroP, LocTree, Predotar, LipoP, MITOPROT, PATS, PTS1, SignalP, TMHMM, and others.

[0210] Concerning ASPAT polypeptides, the present invention is illustrated by transforming plants with the nucleic acid sequence represented by SEQ ID NO: 1, encoding the polypeptide sequence of SEQ ID NO: 2. However, performance of the invention is not restricted to these sequences; the methods of the invention may advantageously be performed using any ASPAT-encoding nucleic acid or ASPAT polypeptide as defined herein.

[0211] Examples of nucleic acids encoding ASPAT polypeptides are given in Table A1 of The Examples section herein. Such nucleic acids are useful in performing the methods of the invention. The amino acid sequences given in Table A1 of The Examples section are example sequences of orthologues and paralogues of the ASPAT polypeptide represented by SEQ ID NO: 2, the terms “orthologues” and “paralogues” being as defined herein. Further orthologues and paralogues may readily be identified by performing a so-called reciprocal blast search. Typically, this involves a first BLAST involving BLASTing a query sequence (for example using any of the sequences listed in Table A1 of The Examples section) against any sequence database, such as the publicly available NCBI database. BLASTN or TBLASTX (using standard default values) are generally used when starting from a nucleotide sequence, and BLASTP or TBLASTN (using standard default values) when starting from a protein sequence. The BLAST results may optionally be filtered. The full-length sequences of either the filtered results or non-filtered results are then BLASTed back (second BLAST) against sequences from the organism from which the query sequence is derived (where the query sequence is SEQ ID NO: 1 or SEQ ID NO: 2, the second BLAST would therefore be against rice sequences). The results of the first and second BLASTs are then compared. A paralogue is identified if a high-ranking hit from the first blast is from the same species as from which the query sequence is derived, a BLAST back then ideally results in the query sequence amongst the highest hits; an orthologue is identified if a high-ranking hit in the first BLAST is not from the same species as from which the query sequence is derived, and preferably results upon BLAST back in the query sequence being among the highest hits.

[0212] Concerning MYB91 polypeptides, the present invention is illustrated by transforming plants with the nucleic acid sequence represented by SEQ ID NO: 220, encoding the MYB91 polypeptide sequence of SEQ ID NO: 221. However, performance of the invention is not restricted to these sequences; the methods of the invention may advantageously be performed using any nucleic acid sequence encoding an MYB91 polypeptide as defined herein.

[0213] Examples of nucleic acid sequences encoding MYB91 polypeptides are given in Table A2 of Example 1 herein. Such nucleic acid sequences are useful in performing the methods of the invention. The polypeptide sequences given in Table A2 of Example 1 are example sequences of orthologues and paralogues of the MYB91 polypeptide represented by SEQ ID NO: 221, the terms “orthologues” and “paralogues” being as defined herein. Further orthologues and paralogues may readily be identified by performing a so-called reciprocal blast search. Typically, this involves a first BLAST involving BLASTing a query sequence (for example using any of the sequences listed in Table A1 of Example 1) against any sequence database, such as the publicly available NCBI database. BLASTN or TBLASTX (using standard default values) are generally used when starting from a nucleotide sequence, and BLASTP or TBLASTN (using standard default values) when starting from a protein sequence. The BLAST results may optionally be filtered. The full-length sequences of either the filtered results or non-filtered results are then BLASTed back (second BLAST) against sequences from the organism from which the query sequence is derived (where the query sequence is SEQ ID NO: 220 or SEQ ID NO: 221, the second BLAST would therefore be against Populus trichocarpa sequences). The results of the first and second BLASTs are then compared. A paralogue is identified if a high-ranking hit from the first blast is from the same species as from which the query sequence is derived, a BLAST back then ideally results in the query sequence amongst the highest hits; an orthologue is identified if a high-ranking hit in the first BLAST is not from the same species as from which the query sequence is derived, and preferably results upon BLAST back in the query sequence being among the highest hits.

[0214] Concerning GASA polypeptides, the present invention is illustrated by transforming plants with the nucleic acid sequence represented by SEQ ID NO: 275, encoding the polypeptide sequence of SEQ ID NO: 276; and with SEQ ID NO: 361, encoding SEQ ID NO: 291. However, performance of the invention is not restricted to these sequences; the methods of the invention may advantageously be performed using any GASA-encoding nucleic acid or GASA polypeptide as defined herein. In a preferred embodiment, the nucleic acid encoding the GASA polypeptide, when expressed in a plant, is a heterologous nucleic acid, the heterologous nucleic acid being sufficiently different from the endogenous GASA nucleic acid such that gene silencing is avoided.

[0215] Examples of nucleic acids encoding GASA polypeptides are given in Table A3 of the Examples section herein. Such nucleic acids are useful in performing the methods of the invention. The amino acid sequences given in Table A3 of the Examples section are example sequences of orthologues and paralogues of the GASA polypeptide represented by SEQ ID NO: 276, the terms “orthologues” and “paralogues” being as defined herein. Further orthologues and paralogues may readily be identified by performing a so-called reciprocal blast search. Typically, this involves a first BLAST involving BLASTing a query sequence (for example using any of the sequences listed in Table A3 of the Examples section) against any sequence database, such as the publicly available NCBI database. BLASTN or TBLASTX (using standard default values) are generally used when starting from a nucleotide sequence, and BLASTP or TBLASTN (using standard default values) when starting from a protein sequence. The BLAST results may optionally be filtered. The full-length sequences of either the filtered results or non-filtered results are then BLASTed back (second BLAST) against sequences from the organism from which the query sequence is derived (where the query sequence is SEQ ID NO: 275 or SEQ ID NO: 276, the second BLAST would therefore be against tomato (Solanum lycopersicum) sequences; where the query sequence is SEQ ID NO: 361 or SEQ ID NO: 291, the second BLAST would therefore be against poplar sequences). The results of the first and second BLASTs are then compared. A paralogue is identified if a high-ranking hit from the first blast is from the same species as from which the query sequence is derived, a BLAST back then ideally results in the query sequence amongst the highest hits; an orthologue is identified if a high-ranking hit in the first BLAST is not from the same species as from which the query sequence is derived, and preferably results upon BLAST back in the query sequence being among the highest hits.

[0216] Concerning AUX/IAA polypeptides, the present invention is illustrated by transforming plants with the nucleic acid sequence represented by SEQ ID NO: 431 or by SEQ ID NO: 737, encoding the polypeptide sequence of SEQ ID NO: 432 or by SEQ ID NO: 738. However, performance of the invention is not restricted to these sequences; the methods of the invention may advantageously be performed using any AUX/IAA-encoding nucleic acid or IAA14-like polypeptide as defined herein.

[0217] Examples of nucleic acids encoding AUX/IAA polypeptides are given in Table A4 and in Table A5 of the Examples section herein. Such nucleic acids are useful in performing the methods of the invention. The amino acid sequences given in Table A4 and in Table A5 of the Examples section are example sequences of orthologues and paralogues of the AUX/IAA polypeptide represented by SEQ ID NO: 432 or by SEQ ID NO: 738, the terms “orthologues” and “paralogues” being as defined herein. Further orthologues and paralogues may readily be identified by performing a so-called reciprocal blast search. Typically, this involves a first BLAST involving BLASTing a query sequence (for example using any of the sequences listed in Table A4 or Table A5 of the Examples section) against any sequence database, such as the publicly available NCBI database. BLASTN or TBLASTX (using standard default values) are generally used when starting from a nucleotide sequence, and BLASTP or TBLASTN (using standard default values) when starting from a protein sequence. The BLAST results may optionally be filtered. The full-length sequences of either the filtered results or non-filtered results are then BLASTed back (second BLAST) against sequences from the organism from which the query sequence is derived (where the query sequence is SEQ ID NO: 431 or SEQ ID NO: 432, the second BLAST would therefore be against Arabidopsis sequences). The results of the first and second BLASTs are then compared. A paralogue is identified if a high-ranking hit from the first blast is from the same species as from which the query sequence is derived, a BLAST back then ideally results in the query sequence amongst the highest hits; an orthologue is identified if a high-ranking hit in the first BLAST is not from the same species as from which the query sequence is derived, and preferably results upon BLAST back in the query sequence being among the highest hits.

[0218] High-ranking hits are those having a low E-value. The lower the E-value, the more significant the score (or in other words the lower the chance that the hit was found by chance). Computation of the E-value is well known in the art. In addition to E-values, comparisons are also scored by percentage identity. Percentage identity refers to the number of identical nucleotides (or amino acids) between the two compared nucleic acid (or polypeptide) sequences over a particular length. In the case of large families, ClustalW may be used, followed by a neighbour joining tree, to help visualize clustering of related genes and to identify orthologues and paralogues.

[0219] Nucleic acid variants may also be useful in practising the methods of the invention. Examples of such variants include nucleic acids encoding homologues and derivatives of any one of the amino acid sequences given in Table A1 to A5 of The Examples section, the terms “homologue” and “derivative” being as defined herein. Also useful in the methods of the invention are nucleic acids encoding homologues and derivatives of orthologues or paralogues of any one of the amino acid sequences given in Table A1 to A5 of The Examples section. Homologues and derivatives useful in the methods of the present invention have substantially the same biological and functional activity as the unmodified protein from which they are derived. Also included are nucleic acids variants in which codon usage is optimised or in which miRNA target sites are removed.

[0220] Further nucleic acid variants useful in practising the methods of the invention include portions of nucleic acids encoding ASPAT polypeptides, or MYB91 polypeptides, or GASA polypeptides, or AUX/IAA polypeptides, nucleic acids hybridising to nucleic acids encoding ASPAT polypeptides, or MYB91 polypeptides, or GASA polypeptides, or AUX/IAA polypeptides, splice variants of nucleic acids encoding ASPAT polypeptides, or MYB91 polypeptides, or GASA polypeptides, or AUX/IAA polypeptides, allelic variants of nucleic acids encoding ASPAT polypeptides, or MYB91 polypeptides, or GASA polypeptides, or AUX/IAA polypeptides, and variants of nucleic acids encoding ASPAT polypeptides, or MYB91 polypeptides, or GASA polypeptides, or AUX/IAA polypeptides, obtained by gene shuffling. The terms hybridising sequence, splice variant, allelic variant and gene shuffling are as described herein.

[0221] Nucleic acids encoding ASPAT polypeptides, or MYB91 polypeptides, or GASA polypeptides, or AUX/IAA polypeptides, need not be full-length nucleic acids, since performance of the methods of the invention does not rely on the use of full-length nucleic acid sequences. According to the present invention, there is provided a method for enhancing yield-related traits in plants, comprising introducing and expressing in a plant a portion of any one of the nucleic acid sequences given in Table A1 to A5 of The Examples section, or a portion of a nucleic acid encoding an orthologue, paralogue or homologue of any of the amino acid sequences given in Table A1 to A5 of The Examples section.

[0222] A portion of a nucleic acid may be prepared, for example, by making one or more deletions to the nucleic acid. The portions may be used in isolated form or they may be fused to other coding (or non-coding) sequences in order to, for example, produce a protein that combines several activities. When fused to other coding sequences, the resultant polypeptide produced upon translation may be bigger than that predicted for the protein portion.

[0223] Concerning ASPAT polypeptides, portions useful in the methods of the invention, encode an ASPAT polypeptide as defined herein, and have substantially the same biological activity as the amino acid sequences given in Table A1 of The Examples section. Preferably, the portion is a portion of any one of the nucleic acids given in Table A1 of The Examples section, or is a portion of a nucleic acid encoding an orthologue or paralogue of any one of the amino acid sequences given in Table A1 of The Examples section.

[0224] Preferably the portion is at least 100, 200, 300, 400, 500, 550, 600, 650, 700, 750, 800, 850, 900, 950, 1000 consecutive nucleotides in length, the consecutive nucleotides being of any one of the nucleic acid sequences given in Table A1 of The Examples section, or of a nucleic acid encoding an orthologue or paralogue of any one of the amino acid sequences given in Table A1 of The Examples section. Even more preferably the portion is a portion of the nucleic acid of SEQ ID NO: 1, most preferably is the nucleic acid of SEQ ID NO: 3. Preferably, the portion encodes a fragment of an amino acid sequence which, when used in the construction of a phylogenetic tree, such as the one depicted in FIG. 2 clusters in increasing order of preference with any of the polypeptides in phylogenetic class 1, class 2, class 3 and class 4 as set forth in Table B1. Most preferably the portion encodes the amino acid fragment as represented by SEQ ID NO: 4.

[0225] Concerning MYB91 polypeptides, portions useful in the methods of the invention, encode an MYB91 polypeptide as defined herein, and have substantially the same biological activity as the polypeptide sequences given in Table A2 of Example 1. Preferably, the portion is a portion of any one of the nucleic acid sequences given in Table A2 of Example 1, or is a portion of a nucleic acid sequence encoding an orthologue or paralogue of any one of the polypeptide sequences given in Table A2 of Example 1. Preferably the portion is, in increasing order of preference at least 500, 550, 600, 650, 700, 750, 800, 850, 900, 950, 1000, 1050 or more consecutive nucleotides in length, the consecutive nucleotides being of any one of the nucleic acid sequences given in Table A2 of Example 1, or of a nucleic acid sequence encoding an orthologue or paralogue of any one of the polypeptide sequences given in Table A2 of Example 1. Preferably, the portion is a portion of a nucleic sequence encoding a polypeptide sequence comprising (i) in increasing order of preference at least 50%, 55%, 60%, 65%, 70%, 75%, 80%, 85%, 90%, 95%, 98%, 99% or more amino acid sequence identity to a MYB DNA binding domain with an InterPro accession number IPR014778, as represented by SEQ ID NO: 269; and (ii) in increasing order of preference at least 50%, 55%, 60%, 65%, 70%, 75%, 80%, 85%, 90%, 95%, 98%, 99% or more amino acid sequence identity to a MYB DNA binding domain with an InterPro accession number IPR014778, as represented by SEQ ID NO: 270; and (iii) in increasing order of preference at least 50%, 55%, 60%, 65%, 70%, 75%, 80%, 85%, 90%, 95%, 98%, 99% or more amino acid sequence identity to a Conserved Domain as represented by SEQ ID NO: 271. More preferably, the portion is a portion of a nucleic sequence encoding a polypeptide sequence having in increasing order of preference at least 50%, 55%, 60%, 65%, 70%, 75%, 80%, 85%, 90%, 95%, 98%, 99% or more amino acid sequence identity to the MYB91 polypeptide as represented by SEQ ID NO: 221 or to any of the polypeptide sequences given in Table A2 herein. Most preferably, the portion is a portion of the nucleic acid sequence of SEQ ID NO: 220.

[0226] Concerning GASA polypeptides, portions useful in the methods of the invention, encode a GASA polypeptide as defined herein, and have substantially the same biological activity as the amino acid sequences given in Table A3 of the Examples section. Preferably, the portion is a portion of any one of the nucleic acids given in Table A3 of the Examples section, or is a portion of a nucleic acid encoding an orthologue or paralogue of any one of the amino acid sequences given in Table A3 of the Examples section. Preferably the portion is at least 200, 300, 400, 500, 550, 600, 650, 700, 750, 800, 850, 900, 950, 1000 consecutive nucleotides in length, the consecutive nucleotides being of any one of the nucleic acid sequences given in Table A3 of the Examples section, or of a nucleic acid encoding an orthologue or paralogue of any one of the amino acid sequences given in Table A3 of the Examples section. Most preferably the portion is a portion of the nucleic acid of SEQ ID NO: 275. Preferably, the portion encodes a fragment of an amino acid sequence which, when used in the construction of a phylogenetic tree, such as the one depicted in FIG. 9, clusters with the group of GASA polypeptides comprising the amino acid sequence represented by SEQ ID NO: 276 (or SEQ ID NO: 291 or SEQ ID NO: 292) rather than with any other group.

[0227] Concerning AUX/IAA polypeptides, portions useful in the methods of the invention, encode an AUX/IAA polypeptide as defined herein, and have substantially the same biological activity as the amino acid sequences given in Table A4 or in Table A5 of the Examples section. Preferably, the portion is a portion of any one of the nucleic acids given in Table A4 or in Table A5 of the Examples section, or is a portion of a nucleic acid encoding an orthologue or paralogue of any one of the amino acid sequences given in Table A4 or in Table A5 of the Examples section. Preferably the portion is at least 100, 200, 300, 400, 500, 550, 600, 650, 700, 750, 800, 850, 900, 950, 1000 consecutive nucleotides in length, the consecutive nucleotides being of any one of the nucleic acid sequences given in Table A4 or in Table A5 of the Examples section, or of a nucleic acid encoding an orthologue or paralogue of any one of the amino acid sequences given in Table A4 or in Table A5 of the Examples section. Most preferably the portion is a portion of the nucleic acid of SEQ ID NO: 431 or of SEQ ID NO: 737. Preferably, the portion encodes a fragment of an amino acid sequence comprising an AUX/IAA domain (PFAM accession number PF2309, InterPro entry IPR003311).

[0228] In the case of an IAA14-like polypeptide, preferably, the portion encodes a fragment of an amino acid sequence which, when used in the construction of a phylogenetic tree, as depicted in FIG. 1 in Remington et al. (Plant Physiol. 135, 1738-1752, 2004), clusters with group A of the IAA14-like polypeptides, which comprises the amino acid sequence represented by SEQ ID NO: 738, rather than with any other group (see also FIG. 13).

[0229] Another nucleic acid variant useful in the methods of the invention is a nucleic acid capable of hybridising, under reduced stringency conditions, preferably under stringent conditions, with a nucleic acid encoding an ASPAT polypeptide, or an MYB91 polypeptide, or a GASA polypeptide, or an AUX/IAA polypeptide, as defined herein, or with a portion as defined herein.

[0230] According to the present invention, there is provided a method for enhancing yield-related traits in plants, comprising introducing and expressing in a plant a nucleic acid capable of hybridizing to any one of the nucleic acids given in Table A1 to A5 of The Examples section, or comprising introducing and expressing in a plant a nucleic acid capable of hybridising to a nucleic acid encoding an orthologue, paralogue or homologue of any of the nucleic acid sequences given in Table A1 to A5 of The Examples section.

[0231] Concerning ASPAT polypeptides, hybridising sequences useful in the methods of the invention encode an ASPAT polypeptide as defined herein, having substantially the same biological activity as the amino acid sequences given in Table A1 of The Examples section. Preferably, the hybridising sequence is capable of hybridising to the complement of any one of the nucleic acids given in Table A1 of The Examples section, or to a portion of any of these sequences, a portion being as defined above, or the hybridising sequence is capable of hybridising to the complement of a nucleic acid encoding an orthologue or paralogue of any one of the amino acid sequences given in Table A1 of The Examples section. Even more preferably, the hybridising sequence is capable of hybridising to the complement of a nucleic acid as represented by SEQ ID NO: 1 or to a portion thereof. Most preferably the hybridising sequence is as represented by SEQ ID NO: 3.

[0232] Preferably, the hybridising sequence encodes a polypeptide with an amino acid sequence which, when full-length and used in the construction of a phylogenetic tree, such as the one depicted in FIG. 2 clusters in increasing order of preference with any of the polypeptides in phylogenetic class 1, class 2, class 3 and class 4 as set forth in Table B1.

[0233] Concerning MYB91 polypeptides, hybridising sequences useful in the methods of the invention encode an MYB91 polypeptide as defined herein, and have substantially the same biological activity as the polypeptide sequences given in Table A2 of Example 1. Preferably, the hybridising sequence is capable of hybridising to any one of the nucleic acid sequences given in Table A2 of Example 1, or to a complement thereof, or to a portion of any of these sequences, a portion being as defined above, or wherein the hybridising sequence is capable of hybridising to a nucleic acid sequence encoding an orthologue or paralogue of any one of the polypeptide sequences given in Table A2 of Example 1, or to a complement thereof. Preferably, the hybridising sequence is capable of hybridising to a nucleic acid sequence encoding a polypeptide sequence comprising (i) in increasing order of preference at least 50%, 55%, 60%, 65%, 70%, 75%, 80%, 85%, 90%, 95%, 98%, 99% or more amino acid sequence identity to a MYB DNA binding domain with an InterPro accession number IPR014778, as represented by SEQ ID NO: 269; and (ii) in increasing order of preference at least 50%, 55%, 60%, 65%, 70%, 75%, 80%, 85%, 90%, 95%, 98%, 99% or more amino acid sequence identity to a MYB DNA binding domain with an InterPro accession number IPR014778, as represented by SEQ ID NO: 270; and (iii) in increasing order of preference at least 50%, 55%, 60%, 65%, 70%, 75%, 80%, 85%, 90%, 95%, 98%, 99% or more amino acid sequence identity to a Conserved Domain as represented by SEQ ID NO: 271. More preferably, the hybridising sequence is capable of hybridising to a nucleic acid sequence encoding a polypeptide sequence having in increasing order of preference at least 50%, 55%, 60%, 65%, 70%, 75%, 80%, 85%, 90%, 95%, 98%, 99% or more amino acid sequence identity to the MYB91 polypeptide as represented by SEQ ID NO: 221 or to any of the polypeptide sequences given in Table A2 herein. Most preferably, the hybridising sequence is capable of hybridising to a nucleic acid sequence as represented by SEQ ID NO: 220 or to a portion thereof.

[0234] Concerning GASA polypeptides, hybridising sequences useful in the methods of the invention encode a GASA polypeptide as defined herein, having substantially the same biological activity as the amino acid sequences given in Table A3 of the Examples section. Preferably, the hybridising sequence is capable of hybridising to the complement of any one of the nucleic acids given in Table A3 of the Examples section, or to a portion of any of these sequences, a portion being as defined above, or the hybridising sequence is capable of hybridising to the complement of a nucleic acid encoding an orthologue or paralogue of any one of the amino acid sequences given in Table A3 of the Examples section. Most preferably, the hybridising sequence is capable of hybridising to the complement of a nucleic acid as represented by SEQ ID NO: 275 or to a portion thereof.

[0235] Preferably, the hybridising sequence encodes a polypeptide with an amino acid sequence which, when full-length and used in the construction of a phylogenetic tree, such as the one depicted in FIG. 9, clusters with the group of GASA polypeptides comprising the amino acid sequence represented by SEQ ID NO: 276 (or SEQ ID NO: 291 or SEQ ID NO: 292) rather than with any other group.

[0236] Concerning AUX/IAA polypeptides, hybridising sequences useful in the methods of the invention encode an AUX/IAA polypeptide as defined herein, having substantially the same biological activity as the amino acid sequences given in Table A4 or in Table A5 of the Examples section. Preferably, the hybridising sequence is capable of hybridising to the complement of any one of the nucleic acids given in Table A4 or in Table A5 of the Examples section, or to a portion of any of these sequences, a portion being as defined above, or the hybridising sequence is capable of hybridising to the complement of a nucleic acid encoding an orthologue or paralogue of any one of the amino acid sequences given in Table A4 or in Table A5 of the Examples section. Most preferably, the hybridising sequence is capable of hybridising to the complement of a nucleic acid as represented by SEQ ID NO: 431 or of SEQ ID NO: 737 or to a portion thereof.

[0237] Preferably, the hybridising sequence or its complementary sequence encodes a polypeptide with an amino acid sequence comprising an AUX/IAA domain (PFAM accession number PF2309, InterPro entry IPR003311).

[0238] In the case IAA14-like polypeptides, preferably, the hybridising sequence encodes a polypeptide with an amino acid sequence which, when full-length and used in the construction of a phylogenetic tree, as depicted in FIG. 1 in Remington et al. (Plant Physiol. 135, 1738-1752, 2004), clusters with group A of the IAA14-like polypeptides, which comprises the amino acid sequence represented by SEQ ID NO: 738, rather than with any other group (see also FIG. 15).

[0239] Another nucleic acid variant useful in the methods of the invention is a splice variant encoding an ASPAT polypeptide, or an MYB91 polypeptide, or a GASA polypeptide, or an AUX/IAA polypeptide, as defined hereinabove, a splice variant being as defined herein.

[0240] According to the present invention, there is provided a method for enhancing yield-related traits in plants, comprising introducing and expressing in a plant a splice variant of any one of the nucleic acid sequences given in Table A1 to A5 of The Examples section, or a splice variant of a nucleic acid encoding an orthologue, paralogue or homologue of any of the amino acid sequences given in Table A1 to A5 of The Examples section.

[0241] Concerning ASPAT polypeptides, preferred splice variants are splice variants of a nucleic acid represented by SEQ ID NO: 1, or a splice variant of a nucleic acid encoding an orthologue or paralogue of SEQ ID NO: 2. Preferably, the amino acid sequence encoded by the splice variant, when used in the construction of a phylogenetic tree, such as the one depicted in FIG. 2 clusters in increasing order of preference with any of the polypeptides in phylogenetic class 1, class 2, class 3 and class 4 as set forth in Table B1.

[0242] Concerning MYB91 polypeptides, preferred splice variants are splice variants of a nucleic acid sequence represented by SEQ ID NO: 220, or a splice variant of a nucleic acid sequence encoding an orthologue or paralogue of SEQ ID NO: 221. Preferably, the splice variant is a splice variant of a nucleic acid sequence encoding a polypeptide sequence comprising (i) in increasing order of preference at least 50%, 55%, 60%, 65%, 70%, 75%, 80%, 85%, 90%, 95%, 98%, 99% or more amino acid sequence identity to a MYB DNA binding domain with an InterPro accession number IPR014778, as represented by SEQ ID NO: 269; and (ii) in increasing order of preference at least 50%, 55%, 60%, 65%, 70%, 75%, 80%, 85%, 90%, 95%, 98%, 99% or more amino acid sequence identity to a MYB DNA binding domain with an InterPro accession number IPR014778, as represented by SEQ ID NO: 270; and (iii) in increasing order of preference at least 50%, 55%, 60%, 65%, 70%, 75%, 80%, 85%, 90%, 95%, 98%, 99% or more amino acid sequence identity to a Conserved Domain as represented by SEQ ID NO: 271. More preferably, the splice variant is a splice variant of a nucleic acid sequence encoding a polypeptide sequence having in increasing order of preference at least 50%, 55%, 60%, 65%, 70%, 75%, 80%, 85%, 90%, 95%, 98%, 99% or more amino acid sequence identity to the MYB91 polypeptide as represented by SEQ ID NO: 221 or to any of the polypeptide sequences given in Table A2 herein. Most preferably, the splice variant is a splice variant of a nucleic acid sequence as represented by SEQ ID NO: 220, or of a nucleic acid sequence encoding a polypeptide sequence as represented by SEQ ID NO: 221.

[0243] Concerning GASA polypeptides, preferred splice variants are splice variants of a nucleic acid represented by SEQ ID NO: 275, or a splice variant of a nucleic acid encoding an orthologue or paralogue of SEQ ID NO: 276. Preferably, the amino acid sequence encoded by the splice variant, when used in the construction of a phylogenetic tree, such as the one depicted in FIG. 93, clusters with the group of GASA polypeptides comprising the amino acid sequence represented by SEQ ID NO: 276 (or SEQ ID NO: 291 or SEQ ID NO: 292) rather than with any other group.

[0244] Concerning AUX/IAA polypeptides, preferred splice variants are splice variants of a nucleic acid represented by SEQ ID NO: 431 or of SEQ ID NO: 737, or a splice variant of a nucleic acid encoding an orthologue or paralogue of SEQ ID NO: 432 or of SEQ ID NO: 738.

[0245] Preferably, the amino acid sequence encoded by the splice variant comprises an AUX/IAA domain (PFAM accession number PF2309, InterPro entry IPR003311).

[0246] In the case of IAA14-like polypeptides, preferably, the amino acid sequence encoded by the splice variant, when used in the construction of a phylogenetic tree, as depicted in FIG. 1 in Remington et al. (Plant Physiol. 135, 1738-1752, 2004), clusters with group A of the IAA14-like polypeptides, which comprises the amino acid sequence represented by SEQ ID NO: 738, rather than with any other group (see also FIG. 15).

[0247] Another nucleic acid variant useful in performing the methods of the invention is an allelic variant of a nucleic acid encoding an ASPAT polypeptide, or an MYB91 polypeptide, or a GASA polypeptide, or an AUX/IAA polypeptide, as defined hereinabove, an allelic variant being as defined herein.

[0248] According to the present invention, there is provided a method for enhancing yield-related traits in plants, comprising introducing and expressing in a plant an allelic variant of any one of the nucleic acids given in Table A1 to A5 of The Examples section, or comprising introducing and expressing in a plant an allelic variant of a nucleic acid encoding an orthologue, paralogue or homologue of any of the amino acid sequences given in Table A1 to A5 of The Examples section.

[0249] Concerning ASPAT polypeptides, the polypeptides encoded by allelic variants useful in the methods of the present invention have substantially the same biological activity as the ASPAT polypeptide of SEQ ID NO: 2 and any of the amino acids depicted in Table A1 of The Examples section. Allelic variants exist in nature, and encompassed within the methods of the present invention is the use of these natural alleles. Preferably, the allelic variant is an allelic variant of SEQ ID NO: 1 or an allelic variant of a nucleic acid encoding an orthologue or paralogue of SEQ ID NO: 2. Preferably, the amino acid sequence encoded by the allelic variant, when used in the construction of a phylogenetic tree, such as the one depicted in FIG. 2 clusters in increasing order of preference with any of the polypeptides in phylogenetic class 1, class 2, class 3 and class 4 as set forth in Table B1.

[0250] Concerning MYB91 polypeptides, the allelic variants useful in the methods of the present invention have substantially the same biological activity as the MYB91 polypeptide of SEQ ID NO: 221 and any of the polypeptide sequences depicted in Table A2 of Example 1. Allelic variants exist in nature, and encompassed within the methods of the present invention is the use of these natural alleles. Preferably, the allelic variant is an allelic variant of a polypeptide sequence comprising (i) in increasing order of preference at least 50%, 55%, 60%, 65%, 70%, 75%, 80%, 85%, 90%, 95%, 98%, 99% or more amino acid sequence identity to a MYB DNA binding domain with an InterPro accession number IPR014778, as represented by SEQ ID NO: 269; and (ii) in increasing order of preference at least 50%, 55%, 60%, 65%, 70%, 75%, 80%, 85%, 90%, 95%, 98%, 99% or more amino acid sequence identity to a MYB DNA binding domain with an InterPro accession number IPR014778, as represented by SEQ ID NO: 270; and (iii) in increasing order of preference at least 50%, 55%, 60%, 65%, 70%, 75%, 80%, 85%, 90%, 95%, 98%, 99% or more amino acid sequence identity to a Conserved Domain as represented by SEQ ID NO: 271. More preferably the allelic variant is an allelic variant encoding a polypeptide sequence having in increasing order of preference at least 50%, 55%, 60%, 65%, 70%, 75%, 80%, 85%, 90%, 95%, 98%, 99% or more amino acid sequence identity to the MYB91 polypeptide as represented by SEQ ID NO: 221 or to any of the polypeptide sequences given in Table A2 herein. Most preferably, the allelic variant is an allelic variant of SEQ ID NO: 220 or an allelic variant of a nucleic acid sequence encoding an orthologue or paralogue of SEQ ID NO: 221.

[0251] Concerning GASA polypeptides, the polypeptides encoded by allelic variants useful in the methods of the present invention have substantially the same biological activity as the GASA polypeptide of SEQ ID NO: 276 and any of the amino acids depicted in Table A3 of the Examples section. Allelic variants exist in nature, and encompassed within the methods of the present invention is the use of these natural alleles. Preferably, the allelic variant is an allelic variant of SEQ ID NO: 275 or an allelic variant of a nucleic acid encoding an orthologue or paralogue of SEQ ID NO: 276. Preferably, the amino acid sequence encoded by the allelic variant, when used in the construction of a phylogenetic tree, such as the one depicted in FIG. 9, clusters with the group of GASA polypeptides comprising the amino acid sequence represented by SEQ ID NO: 276 (or SEQ ID NO: 291 or SEQ ID NO: 292) rather than with any other group.

[0252] Concerning AUX/IAA polypeptides, the polypeptides encoded by allelic variants useful in the methods of the present invention have substantially the same biological activity as the AUX/IAA polypeptide of SEQ ID NO: 432 or of SEQ ID NO: 738 and any of the amino acids depicted in Table A4 or in Table A5 of the Examples section. Allelic variants exist in nature, and encompassed within the methods of the present invention is the use of these natural alleles. Preferably, the allelic variant is an allelic variant of SEQ ID NO: 431 or of SEQ ID NO: 737 or an allelic variant of a nucleic acid encoding an orthologue or paralogue of SEQ ID NO: 432 or of SEQ ID NO: 738. Preferably, the amino acid sequence encoded by the allelic variant comprises an AUX/IAA domain (PFAM accession number PF2309, InterPro entry IPR003311). In the case of IAA14-like, preferably, the amino acid sequence encoded by the allelic variant, when used in the construction of a phylogenetic tree, as depicted in FIG. 1 in Remington et al. (Plant Physiol. 135, 1738-1752, 2004), clusters with group A of the IAA14-like polypeptides, which comprises the amino acid sequence represented by SEQ ID NO: 738, rather than with any other group (see also FIG. 15).

[0253] Gene shuffling or directed evolution may also be used to generate variants of nucleic acids encoding ASPAT polypeptides, or MYB91 polypeptides, GASA polypeptides, AUX/IAA polypeptides, or as defined above; the term “gene shuffling” being as defined herein.

[0254] According to the present invention, there is provided a method for enhancing yield-related traits in plants, comprising introducing and expressing in a plant a variant of any one of the nucleic acid sequences given in Table A1 to A5 of The Examples section, or comprising introducing and expressing in a plant a variant of a nucleic acid encoding an orthologue, paralogue or homologue of any of the amino acid sequences given in Table A1 to A5 of The Examples section, which variant nucleic acid is obtained by gene shuffling.

[0255] Concerning ASPAT polypeptides, preferably, the amino acid sequence encoded by the variant nucleic acid obtained by gene shuffling, when used in the construction of a phylogenetic tree such as the one depicted in FIG. 2 clusters in increasing order of preference with any of the polypeptides in phylogenetic class 1, class 2, class 3 and class 4 as set forth in Table B1.

[0256] Concerning MYB91 polypeptides, preferably, the variant nucleic acid sequence obtained by gene shuffling encodes a polypeptide sequence comprising (i) in increasing order of preference at least 50%, 55%, 60%, 65%, 70%, 75%, 80%, 85%, 90%, 95%, 98%, 99% or more amino acid sequence identity to a MYB DNA binding domain with an InterPro accession number IPR014778, as represented by SEQ ID NO: 269; and (ii) in increasing order of preference at least 50%, 55%, 60%, 65%, 70%, 75%, 80%, 85%, 90%, 95%, 98%_{,} 99% or more amino acid sequence identity to a MYB DNA binding domain with an InterPro accession number IPR014778, as represented by SEQ ID NO: 270; and (iii) in increasing order of preference at least 50%, 55%, 60%, 65%, 70%, 75%, 80%, 85%, 90%, 95%, 98%, 99% or more amino acid sequence identity to a Conserved Domain as represented by SEQ ID NO: 271. More preferably, the variant nucleic acid sequence obtained by gene shuffling encodes a polypeptide sequence having in increasing order of preference at least 50%, 55%, 60%, 65%, 70%, 75%, 80%, 85%, 90%, 95%, 98%, 99% or more amino acid sequence identity to the MYB91 polypeptide as represented by SEQ ID NO: 221 or to any of the polypeptide sequences given in Table A1 herein. Most preferably, the nucleic acid sequence obtained by gene shuffling encodes a polypeptide sequence as represented by SEQ ID NO: 221.

[0257] Concerning GASA polypeptides, preferably, the amino acid sequence encoded by the variant nucleic acid obtained by gene shuffling, when used in the construction of a phylogenetic tree such as the one depicted in FIG. 9, clusters with the group of GASA polypeptides comprising the amino acid sequence represented by SEQ ID NO: 276 (or SEQ ID NO: 291 or SEQ ID NO: 292) rather than with any other group.

[0258] In the case of IAA14-like polypeptides, preferably, the amino acid sequence encoded by the variant nucleic acid obtained by gene shuffling, when used in the construction of a phylogenetic tree, as depicted in FIG. 1 in Remington et al. (Plant Physiol. 135, 1738-1752, 2004), clusters with group A of the IAA14-like polypeptides, which comprises the amino acid sequence represented by SEQ ID NO: 738, rather than with any other group (see also FIG. 15).

[0259] Furthermore, nucleic acid variants may also be obtained by site-directed mutagenesis. Several methods are available to achieve site-directed mutagenesis, the most common being PCR based methods (Current Protocols in Molecular Biology. Wiley Eds.).

[0260] Nucleic acids encoding ASPAT polypeptides may be derived from any natural or artificial source. The nucleic acid may be modified from its native form in composition and/or genomic environment through deliberate human manipulation. Preferably the ASPAT polypeptide-encoding nucleic acid is from a plant, further preferably from a monocotyledonous plant, more preferably from the family Poaceae, most preferably the nucleic acid is from Oryza sativa.

[0261] Advantageously, the invention also provides hitherto unknown ASPAT-encoding nucleic acids and ASPAT polypeptides.

[0262] According to a further embodiment of the present invention, there is therefore provided an isolated nucleic acid molecule selected from:
[0263] (i) a nucleic acid represented by any one of SEQ ID NO: 81, 147, 153, 183 and 185;
[0264] (ii) the complement of a nucleic acid represented by any one of SEQ ID NO: 81, 147, 153, 183 and 185;
[0265] (iii) a nucleic acid encoding the polypeptide as represented by any one of SEQ ID NO: 82, 148, 154, 184 and 186, preferably as a result of the degeneracy of the genetic code, said isolated nucleic acid can be derived from a polypeptide sequence as represented by any one of SEQ ID NO: 82, 148, 154, 184 and 186 and further preferably confers enhanced yield-related traits relative to control plants;
[0266] (iv) a nucleic acid having, in increasing order of preference at least 30%, 31%, 32%, 33%, 34%, 35%, 36%, 37%, 38%, 39%, 40%, 41%, 42%, 43%, 44%, 45%, 46%, 47%, 48%, 49%, 50%, 51%, 52%, 53%, 54%, 55%, 56%, 57%, 58%, 59%, 60%, 61%, 62%, 63%, 64%, 65%, 66%, 67%, 68%, 69%, 70%, 71%, 72%, 73%, 74%, 75%, 76%, 77%, 78%, 79%, 80%, 81%, 82%, 83%, 84%, 85%, 86%, 87%, 88%, 89%, 90%, 91%, 92%, 93%, 94%, 95%, 96%, 97%, 98%, or 99% sequence identity with any of the nucleic acid sequences of Table A1 and further preferably conferring enhanced yield-related traits relative to control plants;
[0267] (v) a nucleic acid molecule which hybridizes with a nucleic acid molecule of (i) to
[0268] (iv) under stringent hybridization conditions and preferably confers enhanced yield-related traits relative to control plants;
[0269] (vi) a nucleic acid encoding an ASPAT polypeptide having, in increasing order of preference, at least 50%, 51%, 52%, 53%, 54%, 55%, 56%, 57%, 58%, 59%, 60%, 61%, 62%, 63%, 64%, 65%, 66%, 67%, 68%, 69%, 70%, 71%, 72%, 73%, 74%, 75%, 76%, 77%, 78%, 79%, 80%, 81%, 82%, 83%, 84%, 85%, 86%, 87%, 88%, 89%, 90%, 91%, 92%, 93%, 94%, 95%, 96%, 97%, 98%, or 99% sequence identity to the amino acid sequence represented by any one of SEQ ID NO: 82, 148, 154, 184 and 186 and any of the other amino acid sequences in Table A1 and preferably conferring enhanced yield-related traits relative to control plants.

[0270] According to a further embodiment of the present invention, there is also provided an isolated polypeptide selected from:
[0271] (i) an amino acid sequence represented by any one of SEQ ID NO: 82, 148, 154, 184 and 186;
[0272] (ii) an amino acid sequence having, in increasing order of preference, at least 50%, 51%, 52%, 53%, 54%, 55%, 56%, 57%, 58%, 59%, 60%, 61%, 62%, 63%, 64%, 65%, 66%, 67%, 68%, 69%, 70%, 71%, 72%, 73%, 74%, 75%, 76%, 77%, 78%, 79%, 80%, 81%, 82%, 83%, 84%, 85%, 86%, 87%, 88%, 89%, 90%, 91%, 92%, 93%, 94%, 95%, 96%, 97%, 98%, or 99% sequence identity to the amino acid sequence represented by any one of SEQ ID NO: 82, 148, 154, 184 and 186, and any of the other amino acid sequences in Table A1 and preferably conferring enhanced yield-related traits relative to control plants. (iii) derivatives of any of the amino acid sequences given in (i) or (ii) above.

[0273] Nucleic acid sequences encoding MYB91 polypeptides may be derived from any natural or artificial source. The nucleic acid sequence may be modified from its native form in composition and/or genomic environment through deliberate human manipulation. The nucleic acid sequence encoding an MYB91 polypeptide is from a plant, further preferably from a dicotyledonous plant, more preferably from the family Salicaceae, most preferably the nucleic acid sequence is from Populus trichocarpa.

[0274] Nucleic acids encoding GASA polypeptides may be derived from any natural or artificial source. The nucleic acid may be modified from its native form in composition and/or genomic environment through deliberate human manipulation. Preferably the GASA polypeptide-encoding nucleic acid is from a plant, further preferably from a dicotyledonous plant, more preferably from the family Solanaceae, most preferably the nucleic acid is from Solanum lycopersicum. Alternatively, the GASA polypeptide-encoding nucleic acid is from the family Salicaceae, preferably from Populus sp.

[0275] Nucleic acids encoding AUX/IAA polypeptides may be derived from any natural or artificial source. The nucleic acid may be modified from its native form in composition and/or genomic environment through deliberate human manipulation. Preferably the IAA14-like polypeptide-encoding nucleic acid is from a plant, further preferably from a monocotyledonous or a dicotyledonous plan, more preferably from the family Poaceae or Brassicaceae, most preferably the nucleic acid is from Oryza sativa or from Arabidopsis thaliana.

[0276] Performance of the methods of the invention gives plants having enhanced yield-related traits. In particular performance of the methods of the invention gives plants having increased yield, especially increased seed yield relative to control plants. The terms “yield” and “seed yield” are described in more detail in the “definitions” section herein.

[0277] Reference herein to enhanced yield-related traits is taken to mean an increase in biomass (weight) of one or more parts of a plant, which may include aboveground (harvestable) parts and/or (harvestable) parts below ground. In particular, such harvestable parts are seeds, and performance of the methods of the invention results in plants having increased seed yield relative to the seed yield of control plants. Concerning GASA polypeptides, It should be noted that the plants with modulated expression of a nucleic acid encoding a GASA polypeptide according to the methods of this invention did not show significant changes in branching properties compared to the control plants.

[0278] Taking corn as an example, a yield increase may be manifested as one or more of the following: increase in the number of plants established per square meter, an increase in the number of ears per plant, an increase in the number of rows, number of kernels per row, kernel weight, thousand kernel weight, ear length/diameter, increase in the seed filling rate (which is the number of filled seeds divided by the total number of seeds and multiplied by 100), among others. Taking rice as an example, a yield increase may manifest itself as an increase in one or more of the following: number of plants per square meter, number of panicles per plant, number of spikelets per panicle, number of flowers (florets) per panicle (which is expressed as a ratio of the number of filled seeds over the number of primary panicles), increase in the seed filling rate (which is the number of filled seeds divided by the total number of seeds and multiplied by 100), increase in thousand kernel weight, among others.

[0279] The present invention provides a method for increasing yield, especially seed yield of plants, relative to control plants, which method comprises modulating expression in a plant of a nucleic acid encoding an ASPAT polypeptide, or a GASA polypeptide, or an AUX/IAA polypeptide, as defined herein.

[0280] The present invention also provides a method for increasing yield-related traits of plants relative to control plants, which method comprises increasing expression in a plant of a nucleic acid sequence encoding an MYB91 polypeptide as defined herein.

[0281] Since the transgenic plants according to the present invention have increased yield and/or increased yield-related traits, it is likely that these plants exhibit an increased growth rate (during at least part of their life cycle), relative to the growth rate of control plants at a corresponding stage in their life cycle.

[0282] The increased growth rate may be specific to one or more parts of a plant (including seeds), or may be throughout substantially the whole plant. Plants having an increased growth rate may have a shorter life cycle. The life cycle of a plant may be taken to mean the time needed to grow from a dry mature seed up to the stage where the plant has produced dry mature seeds, similar to the starting material. This life cycle may be influenced by factors such as early vigour, growth rate, greenness index, flowering time and speed of seed maturation. The increase in growth rate may take place at one or more stages in the life cycle of a plant or during substantially the whole plant life cycle. Increased growth rate during the early stages in the life cycle of a plant may reflect increased (early) vigour. The increase in growth rate may alter the harvest cycle of a plant allowing plants to be sown later and/or harvested sooner than would otherwise be possible (a similar effect may be obtained with earlier flowering time; delayed flowering is usually not a desirede trait in crops). If the growth rate is sufficiently increased, it may allow for the further sowing of seeds of the same plant species (for example sowing and harvesting of rice plants followed by sowing and harvesting of further rice plants all within one conventional growing period). Similarly, if the growth rate is sufficiently increased, it may allow for the further sowing of seeds of different plants species (for example the sowing and harvesting of corn plants followed by, for example, the sowing and optional harvesting of soybean, potato or any other suitable plant). Harvesting additional times from the same rootstock in the case of some crop plants may also be possible. Altering the harvest cycle of a plant may lead to an increase in annual biomass production per acre (due to an increase in the number of times (say in a year) that any particular plant may be grown and harvested). An increase in growth rate may also allow for the cultivation of transgenic plants in a wider geographical area than their wild-type counterparts, since the territorial limitations for growing a crop are often determined by adverse environmental conditions either at the time of planting (early season) or at the time of harvesting (late season). Such adverse conditions may be avoided if the harvest cycle is shortened. The growth rate may be determined by deriving various parameters from growth curves, such parameters may be: T-Mid (the time taken for plants to reach 50% of their maximal size) and T-90 (time taken for plants to reach 90% of their maximal size), amongst others.

[0283] According to a preferred feature of the present invention, performance of the methods of the invention gives plants having an increased growth rate relative to control plants. Therefore, according to the present invention, there is provided a method for increasing the growth rate of plants, which method comprises modulating expression in a plant of a nucleic acid encoding an ASPAT polypeptide, or an MYB91 polypeptide, or a GASA polypeptide, or an AUX/IAA polypeptide, as defined herein.

[0284] Increased yield-related traits occur whether the plant is under non-stress conditions or whether the plant is exposed to various stresses compared to control plants grown under comparable conditions. Plants typically respond to exposure to stress by growing more slowly. In conditions of severe stress, the plant may even stop growing altogether. Mild stress on the other hand is defined herein as being any stress to which a plant is exposed which does not result in the plant ceasing to grow altogether without the capacity to resume growth. Mild stress in the sense of the invention leads to a reduction in the growth of the stressed plants of less than 40%, 35% or 30%, preferably less than 25%, 20% or 15%, more preferably less than 14%, 13%, 12%, 11% or 10% or less in comparison to the control plant under non-stress conditions. Due to advances in agricultural practices (irrigation, fertilization, and/or pesticide treatments) severe stresses are not often encountered in cultivated crop plants. As a consequence, the compromised growth induced by mild stress is often an undesirable feature for agriculture. Mild stresses are the everyday biotic and/or abiotic (environmental) stresses to which a plant is exposed. Abiotic stresses may be due to drought or excess water, anaerobic stress, salt stress, chemical toxicity, oxidative stress and hot, cold or freezing temperatures. The abiotic stress may be an osmotic stress caused by a water stress (particularly due to drought), salt stress, oxidative stress or an ionic stress. Biotic stresses are typically those stresses caused by pathogens, such as bacteria, viruses, fungi, nematodes, and insects. The term “non-stress” conditions as used herein are those environmental conditions that allow optimal growth of plants. Persons skilled in the art are aware of normal soil conditions and climatic conditions for a given location.

[0285] Performance of the methods of the invention gives plants grown under non-stress conditions or under mild stress conditions having increased yield-related traits, relative to control plants grown under comparable conditions. Therefore, according to the present invention, there is provided a method for increasing yield-related traits in plants grown under non-stress conditions or under mild stress conditions, which method comprises increasing expression in a plant of a nucleic acid sequence encoding an MYB91 polypeptide.

[0286] In particular, the methods of the present invention may be performed under non-stress conditions or under conditions of mild drought to give plants having increased yield relative to control plants. As reported in Wang et al. (Planta (2003) 218: 1-14), abiotic stress leads to a series of morphological, physiological, biochemical and molecular changes that adversely affect plant growth and productivity. Drought, salinity, extreme temperatures and oxidative stress are known to be interconnected and may induce growth and cellular damage through similar mechanisms. Rabbani et al. (Plant Physiol (2003) 133: 1755-1767) describes a particularly high degree of “cross talk” between drought stress and high-salinity stress. For example, drought and/or salinisation are manifested primarily as osmotic stress, resulting in the disruption of homeostasis and ion distribution in the cell. Oxidative stress, which frequently accompanies high or low temperature, salinity or drought stress, may cause denaturing of functional and structural proteins. As a consequence, these diverse environmental stresses often activate similar cell signalling pathways and cellular responses, such as the production of stress proteins, up-regulation of anti-oxidants, accumulation of compatible solutes and growth arrest. The term “non-stress” conditions as used herein are those environmental conditions that allow optimal growth of plants. Persons skilled in the art are aware of normal soil conditions and climatic conditions for a given location. Plants with optimal growth conditions, (grown under non-stress conditions) typically yield in increasing order of preference at least 97%, 95%, 92%, 90%, 87%, 85%, 83%, 80%, 77% or 75% of the average production of such plant in a given environment. Average production may be calculated on harvest and/or season basis. Persons skilled in the art are aware of average yield productions of a crop.

[0287] Performance of the methods of the invention gives plants grown under non-stress conditions or under mild drought conditions increased yield relative to control plants grown under comparable conditions. Therefore, according to the present invention, there is provided a method for increasing yield in plants grown under non-stress conditions or under mild drought conditions, which method comprises modulating expression in a plant of a nucleic acid encoding an ASPAT polypeptide, or an MYB91 polypeptide, or a GASA polypeptide, or an AUX/IAA polypeptide.

[0288] The term “abiotic stress” as defined herein is taken to mean any one or more of: water stress (due to drought or excess water), anaerobic stress, salt stress, temperature stress (due to hot, cold or freezing temperatures), chemical toxicity stress and oxidative stress. According to one aspect of the invention, the abiotic stress is an osmotic stress, selected from water stress, salt stress, oxidative stress and ionic stress. Preferably, the water stress is drought stress. The term salt stress is not restricted to common salt (NaCl), but may be any stress caused by one or more of: NaCl, KCl, LiCl, MgCl₂, CaCl₂, amongst others.

[0289] Performance of the methods of the invention gives plants grown under conditions of salt stress, increased yield relative to control plants grown under comparable conditions. Therefore, according to the present invention, there is provided a method for increasing yield in plants grown under conditions of salt stress, which method comprises modulating expression in a plant of a nucleic acid encoding an ASPAT polypeptide, or a GASA polypeptide, or an AUX/IAA polypeptide. The term salt stress is not restricted to common salt (NaCl), but may be any one or more of: NaCl, KCl, LiCl, MgCl₂, CaCl₂, amongst others.

[0290] Another example of abiotic environmental stress is the reduced availability of one or more nutrients that need to be assimilated by the plants for growth and development. Because of the strong influence of nutrition utilization efficiency on plant yield and product quality, a huge amount of fertilizer is poured onto fields to optimize plant growth and quality. Productivity of plants ordinarily is limited by three primary nutrients, phosphorous, potassium and nitrogen, which is usually the rate-limiting element in plant growth of these three. Therefore the major nutritional element required for plant growth is nitrogen (N). It is a constituent of numerous important compounds found in living cells, including amino acids, proteins (enzymes), nucleic acids, and chlorophyll. 1.5% to 2% of plant dry matter is nitrogen and approximately 16% of total plant protein. Thus, nitrogen availability is a major limiting factor for crop plant growth and production (Frink et al. (1999) Proc Natl Acad Sci USA 96(4): 1175-1180), and has as well a major impact on protein accumulation and amino acid composition. Therefore, of great interest are crop plants with increased yield-related traits, when grown under nitrogen-limiting conditions.

[0291] Performance of the methods of the invention gives plants grown under conditions of nutrient deficiency, particularly under conditions of nitrogen deficiency, increased yield relative to control plants grown under comparable conditions. Therefore, according to the present invention, there is provided a method for increasing yield in plants grown under conditions of nutrient deficiency, which method comprises modulating expression in a plant of a nucleic acid encoding an ASPAT polypeptide, or a GASA polypeptide, or an AUX/IAA polypeptide. Nutrient deficiency may result from a lack of nutrients such as nitrogen, phosphates and other phosphorous-containing compounds, potassium, calcium, cadmium, magnesium, manganese, iron and boron, amongst others.

[0292] Performance of the methods of the invention gives plants grown under conditions of reduced nutrient availability, particularly under conditions of reduced nitrogen availability, having increased yield-related traits relative to control plants grown under comparable conditions. Therefore, according to the present invention, there is provided a method for increasing yield-related traits in plants grown under conditions of reduced nutrient availablity, preferably reduced nitrogen availability, which method comprises increasing expression in a plant of a nucleic acid sequence encoding an MYB91 polypeptide. Reduced nutrient availability may result from a deficiency or excess of nutrients such as nitrogen, phosphates and other phosphorous-containing compounds, potassium, calcium, cadmium, magnesium, manganese, iron and boron, amongst others. Preferably, reduced nutrient availablity is reduced nitrogen availability.

[0293] Performance of the methods of the invention gives plants having increased yield-related traits, under abiotic stress conditions relative to control plants grown in comparable stress conditions. Therefore, according to the present invention, there is provided a method for increasing yield-related traits, in plants grown under abiotic stress conditions, which method comprises increasing expression in a plant of a nucleic acid sequence encoding an MYB91 polypeptide. According to one aspect of the invention, the abiotic stress is an osmotic stress, selected from one or more of the following: water stress, salt stress, oxidative stress and ionic stress.

[0294] The present invention encompasses plants or parts thereof (including seeds) or cells thereof obtainable by the methods according to the present invention. The plants or parts thereof comprise a nucleic acid transgene encoding an ASPAT polypeptide, or an MYB91 polypeptide, or a GASA polypeptide, or an AUX/IAA polypeptide, as defined above, operably linked to a promoter functioning in plants.

[0295] The invention also provides genetic constructs and vectors to facilitate introduction and/or expression in plants of nucleic acids encoding ASPAT polypeptides, or MYB91 polypeptides, or GASA polypeptides, or AUX/IAA polypeptides, as defined herein. The gene constructs may be inserted into vectors, which may be commercially available, suitable for transforming into plants and suitable for expression of the gene of interest in the transformed cells. The invention also provides use of a gene construct as defined herein in the methods of the invention.

[0296] More specifically, the present invention provides a construct comprising:
[0297] (a) a nucleic acid encoding an ASPAT polypeptide, or an MYB91 polypeptide, or a GASA polypeptide, or an AUX/IAA polypeptide, as defined above;
[0298] (b) one or more control sequences capable of driving expression of the nucleic acid sequence of (a); and optionally
[0299] (c) a transcription termination sequence.

[0300] Preferably, the nucleic acid encoding is an ASPAT polypeptide, or an MYB91 polypeptide, or a GASA polypeptide, or an AUX/IAA polypeptide, as defined above. The term “control sequence” and “termination sequence” are as defined herein.

[0301] Concerning MYB91 polypeptides, preferably, one of the control sequences of a construct is a constitutive promoter isolated from a plant genome. An example of a constitutive promoter is a GOS2 promoter, preferably a GOS2 promoter from rice, most preferably a GOS2 sequence as represented by SEQ ID NO: 272.

[0302] Plants are transformed with a vector comprising any of the nucleic acids described above. The skilled artisan is well aware of the genetic elements that must be present on the vector in order to successfully transform, select and propagate host cells containing the sequence of interest. The sequence of interest is operably linked to one or more control sequences (at least to a promoter).

[0303] Advantageously, any type of promoter, whether natural or synthetic, may be used to drive expression of the nucleic acid sequence, but preferably the promoter is of plant origin. A constitutive promoter is particularly useful in the methods. Preferably the constitutive promoter is also a ubiquitous promoter of medium strength. See the “Definitions” section herein for definitions of the various promoter types. Concerning ASPAT polypeptides, also useful in the methods of the invention is a green tissue-specific promoter.

[0304] Concerning MYB91 polypeptides, advantageously, any type of promoter, whether natural or synthetic, may be used to increase expression of the nucleic acid sequence. A constitutive promoter is particularly useful in the methods, preferably a constitutive promoter isolated from a plant genome. The plant constitutive promoter drives expression of a coding sequence at a level that is in all instances below that obtained under the control of a 35S CaMV viral promoter. An example of such a promoter is a GOS2 promoter as represented by SEQ ID NO: 272.

[0305] Concerning MYB91 polypeptides, organ-specific promoters, for example for preferred expression in leaves, stems, tubers, meristems, seeds, are useful in performing the methods of the invention. Developmentally-regulated and inducible promoters are also useful in performing the methods of the invention. See the “Definitions” section herein for definitions of the various promoter types.

[0306] Concerning ASPAT polypeptides, it should be clear that the applicability of the present invention is not restricted to the ASPAT polypeptide-encoding nucleic acid represented by SEQ ID NO: 1, nor is the applicability of the invention restricted to expression of an ASPAT polypeptide-encoding nucleic acid when driven by a constitutive promoter, or when driven by a green tissue-specific promoter.

[0307] The constitutive promoter is preferably a medium strength promoter, more preferably selected from a plant derived promoter, such as a GOS2 promoter, more preferably is the promoter GOS2 promoter from rice. Further preferably the constitutive promoter is represented by a nucleic acid sequence substantially similar to SEQ ID NO: 218, most preferably the constitutive promoter is as represented by SEQ ID NO: 218. See the “Definitions” section herein for further examples of constitutive promoters.

[0308] According to another preferred feature of the invention, the nucleic acid encoding an ASPAT polypeptide is operably linked to a green tissue-specific promoter. The green tissue-specific promoter is preferably a promoter of the a Protochlorophyllide reductase (PR) gene, more preferably the PR promoter is from rice, further preferably the PR promoter is represented by a nucleic acid sequence substantially similar to SEQ ID NO: 219, most preferably the promoter is as represented by SEQ ID NO: 219. Examples of other green tissue-specific promoters which may also be used to perform the methods of the invention are shown in Table 3 in the “Definitions” section above.

[0309] Concerning MYB91 polypeptides, it should be clear that the applicability of the present invention is not restricted to a nucleic acid sequence encoding the MYB91 polypeptide, as represented by SEQ ID NO: 220, nor is the applicability of the invention restricted to expression of an MYB91 polypeptide-encoding nucleic acid sequence when driven by a constitituve promoter.

[0310] Concerning GASA polypeptides, it should be clear that the applicability of the present invention is not restricted to the GASA polypeptide-encoding nucleic acid represented by SEQ ID NO: 275 or SEQ ID NO: 361, nor is the applicability of the invention restricted to expression of a GASA polypeptide-encoding nucleic acid when driven by a constitutive promoter.

[0311] The constitutive promoter is preferably a medium strength promoter, more preferably selected from a plant derived promoter, such as a GOS2 promoter, more preferably is the promoter a GOS2 promoter from rice. Further preferably the constitutive promoter is represented by a nucleic acid sequence substantially similar to SEQ ID NO: 290, most preferably the constitutive promoter is as represented by SEQ ID NO: 290. See the “Definitions” section herein for further examples of constitutive promoters.

[0312] Optionally, one or more terminator sequences may be used in the construct introduced into a plant. Preferably, the construct comprises an expression cassette comprising a GOS2 promoter and the nucleic acid encoding the GASA polypeptide.

[0313] Concerning AUX/IAA polypeptides, it should be clear that the applicability of the present invention is not restricted to the AUX/IAA polypeptide-encoding nucleic acid represented by SEQ ID NO: 431 or by SEQ ID NO: 737, nor is the applicability of the invention restricted to expression of an AUX/IAA polypeptide-encoding nucleic acid when driven by a constitutive promoter.

[0314] The constitutive promoter is preferably a medium strength promoter, more preferably selected from a plant derived promoter, such as a GOS2 promoter, more preferably is the promoter GOS2 promoter from rice. Further preferably the constitutive promoter is represented by a nucleic acid sequence substantially similar to SEQ ID NO: 669, most preferably the constitutive promoter is as represented by SEQ ID NO: 669. See the “Definitions” section herein for further examples of constitutive promoters.

[0315] Alternatively, the constitutive promoter is preferably a weak constitutive promoter, more preferably selected from a plant derived promoter, such as a High Mobility Group Protein (HMGP) promoter, more preferably is the promoter HMGP promoter from rice. Further preferably the constitutive promoter is represented by a nucleic acid sequence substantially similar to SEQ ID NO: 747, most preferably the constitutive promoter is as represented by SEQ ID NO: 747. See the “Definitions” section herein for further examples of constitutive promoters.

[0316] Optionally, one or more terminator sequences may be used in the construct introduced into a plant. Preferably, the construct comprises an expression cassette comprising a GOS2 or a HMGP promoter, substantially similar to SEQ ID NO: 669 or to SEQ ID NO: 747 respectively, and the nucleic acid encoding the AUX/IAA polypeptide.

[0317] Additional regulatory elements may include transcriptional as well as translational enhancers. Those skilled in the art will be aware of terminator and enhancer sequences that may be suitable for use in performing the invention. An intron sequence may also be added to the 5′ untranslated region (UTR) or in the coding sequence to increase the amount of the mature message that accumulates in the cytosol, as described in the definitions section. Other control sequences (besides promoter, enhancer, silencer, intron sequences, 3′UTR and/or 5′UTR regions) may be protein and/or RNA stabilizing elements. Such sequences would be known or may readily be obtained by a person skilled in the art.

[0318] The genetic constructs of the invention may further include an origin of replication sequence that is required for maintenance and/or replication in a specific cell type. One example is when a genetic construct is required to be maintained in a bacterial cell as an episomal genetic element (e.g. plasmid or cosmid molecule). Preferred origins of replication include, but are not limited to, the f1-ori and colE1.

[0319] For the detection of the successful transfer of the nucleic acid sequences as used in the methods of the invention and/or selection of transgenic plants comprising these nucleic acids, it is advantageous to use marker genes (or reporter genes). Therefore, the genetic construct may optionally comprise a selectable marker gene. Selectable markers are described in more detail in the “definitions” section herein. The marker genes may be removed or excised from the transgenic cell once they are no longer needed. Techniques for marker removal are known in the art, useful techniques are described above in the definitions section.

[0320] It is known that upon stable or transient integration of nucleic acid sequences into plant cells, only a minority of the cells takes up the foreign DNA and, if desired, integrates it into its genome, depending on the expression vector used and the transfection technique used. To identify and select these integrants, a gene coding for a selectable marker (such as the ones described above) is usually introduced into the host cells together with the gene of interest. These markers can for example be used in mutants in which these genes are not functional by, for example, deletion by conventional methods. Furthermore, nucleic acid sequence molecules encoding a selectable marker can be introduced into a host cell on the same vector that comprises the sequence encoding the polypeptides of the invention or used in the methods of the invention, or else in a separate vector. Cells which have been stably transfected with the introduced nucleic acid sequence can be identified for example by selection (for example, cells which have integrated the selectable marker survive whereas the other cells die). The marker genes may be removed or excised from the transgenic cell once they are no longer needed. Techniques for marker gene removal are known in the art, useful techniques are described above in the definitions section.

[0321] The invention also provides a method for the production of transgenic plants having enhanced yield-related traits relative to control plants, comprising introduction and expression in a plant of any nucleic acid encoding an ASPAT polypeptide, or an MYB91 polypeptide, or a GASA polypeptide, or an AUX/IAA polypeptide, as defined hereinabove.

[0322] More specifically, the present invention provides a method for the production of transgenic plants having enhanced yield-related traits, particularly increased seed yield, which method comprises:
[0323] (i) introducing and expressing in a plant, plant part, or plant cell a nucleic acid encoding an ASPAT polypeptide, or an MYB91 polypeptide, or a GASA polypeptide, or an AUX/IAA polypeptide; and
[0324] (ii) cultivating the plant cell under conditions promoting plant growth and development.

[0325] The nucleic acid of (i) may be any of the nucleic acids capable of encoding an ASPAT polypeptide, or an MYB91 polypeptide, or a GASA polypeptide, or an AUX/IAA polypeptide, as defined herein.

[0326] The nucleic acid may be introduced directly into a plant cell or into the plant itself (including introduction into a tissue, organ or any other part of a plant). According to a preferred feature of the present invention, the nucleic acid is preferably introduced into a plant by transformation. The term “transformation” is described in more detail in the “definitions” section herein.

[0327] The nucleic acid may be introduced directly into a plant cell or into the plant itself (including introduction into a tissue, organ or any other part of a plant). According to a preferred feature of the present invention, the nucleic acid is preferably introduced into a plant by transformation. The term “transformation” is described in more detail in the “definitions” section herein.

[0328] The genetically modified plant cells can be regenerated via all methods with which the skilled worker is familiar. Suitable methods can be found in the above-mentioned publications by S. D. Kung and R. Wu, Potrykus or Hofgen and Willmitzer.

[0329] Generally after transformation, plant cells or cell groupings are selected for the presence of one or more markers which are encoded by plant-expressible genes co-transferred with the gene of interest, following which the transformed material is regenerated into a whole plant. To select transformed plants, the plant material obtained in the transformation is, as a rule, subjected to selective conditions so that transformed plants can be distinguished from untransformed plants. For example, the seeds obtained in the above-described manner can be planted and, after an initial growing period, subjected to a suitable selection by spraying. A further possibility consists in growing the seeds, if appropriate after sterilization, on agar plates using a suitable selection agent so that only the transformed seeds can grow into plants. Alternatively, the transformed plants are screened for the presence of a selectable marker such as the ones described above.

[0330] Following DNA transfer and regeneration, putatively transformed plants may also be evaluated, for instance using Southern analysis, for the presence of the gene of interest, copy number and/or genomic organisation. Alternatively or additionally, expression levels of the newly introduced DNA may be monitored using Northern and/or Western analysis, both techniques being well known to persons having ordinary skill in the art.

[0331] The generated transformed plants may be propagated by a variety of means, such as by clonal propagation or classical breeding techniques. For example, a first generation (or T1) transformed plant may be selfed and homozygous second-generation (or T2) transformants selected, and the T2 plants may then further be propagated through classical breeding techniques. The generated transformed organisms may take a variety of forms. For example, they may be chimeras of transformed cells and non-transformed cells; clonal transformants (e.g., all cells transformed to contain the expression cassette); grafts of transformed and untransformed tissues (e.g., in plants, a transformed rootstock grafted to an untransformed scion).

[0332] The present invention clearly extends to any plant cell or plant produced by any of the methods described herein, and to all plant parts and propagules thereof. The present invention extends further to encompass the progeny of a primary transformed or transfected cell, tissue, organ or whole plant that has been produced by any of the aforementioned methods, the only requirement being that progeny exhibit the same genotypic and/or phenotypic characteristic(s) as those produced by the parent in the methods according to the invention.

[0333] The invention also includes host cells containing an isolated nucleic acid encoding an ASPAT polypeptide, or an MYB91 polypeptide, or a GASA polypeptide, or an AUX/IAA polypeptide, as defined hereinabove. Preferred host cells according to the invention are plant cells. Host plants for the nucleic acids or the vector used in the method according to the invention, the expression cassette or construct or vector are, in principle, advantageously all plants, which are capable of synthesizing the polypeptides used in the inventive method.

[0334] The methods of the invention are advantageously applicable to any plant. Plants that are particularly useful in the methods of the invention include all plants which belong to the superfamily Viridiplantae, in particular monocotyledonous and dicotyledonous plants including fodder or forage legumes, ornamental plants, food crops, trees or shrubs. According to a preferred embodiment of the present invention, the plant is a crop plant. Examples of crop plants include soybean, sunflower, canola, alfalfa, rapeseed, linseed, cotton, tomato, potato and tobacco. Further preferably, the plant is a monocotyledonous plant. Examples of monocotyledonous plants include sugarcane. More preferably the plant is a cereal. Examples of cereals include rice, maize, wheat, barley, millet, rye, triticale, sorghum, emmer, spelt, secale, einkorn, teff, milo and oats.

[0335] The invention also extends to harvestable parts of a plant such as, but not limited to seeds, leaves, fruits, flowers, stems, roots, rhizomes, tubers and bulbs, which harvestable parts comprise a recombinant nucleic acid encoding an ASPAT polypeptide, or an MYB91 polypeptide, or a GASA polypeptide, or an AUX/IAA polypeptide. The invention furthermore relates to products derived, preferably directly derived, from a harvestable part of such a plant, such as dry pellets or powders, oil, fat and fatty acids, starch or proteins.

[0336] According to a preferred feature of the invention, the modulated expression is increased expression. Methods for increasing expression of nucleic acids or genes, or gene products, are well documented in the art and examples are provided in the definitions section.

[0337] As mentioned above, a preferred method for modulating expression of a nucleic acid encoding an ASPAT polypeptide, or an MYB91 polypeptide, or a GASA polypeptide, or an AUX/IAA polypeptide, is by introducing and expressing in a plant a nucleic acid encoding an ASPAT polypeptide, or an MYB91 polypeptide, or a GASA polypeptide, or an AUX/IAA polypeptide; however the effects of performing the method, i.e. enhancing yield-related traits may also be achieved using other well known techniques, including but not limited to T-DNA activation tagging, TILLING, homologous recombination. A description of these techniques is provided in the definitions section.

[0338] The present invention also encompasses use of nucleic acids encoding ASPAT polypeptides, or GASA polypeptides, or AUX/IAA polypeptides, as described herein and use of these ASPAT polypeptides, or GASA polypeptides, or AUX/IAA polypeptides, in enhancing any of the aforementioned yield-related traits in plants.

[0339] The present invention also encompasses use of nucleic acid sequences encoding MYB91 polypeptides as described herein and use of these MYB91 polypeptides in increasing any of the aforementioned yield-related traits in plants, under normal growth conditions, under abiotic stress growth (preferably osmotic stress growth conditions) conditions, and under growth conditions of reduced nutrient availability, preferably under conditions of reduced nitrogen availability.

[0340] Nucleic acids encoding an ASPAT polypeptide, or an MYB91 polypeptide, or a GASA polypeptide, or an AUX/IAA polypeptide, described herein, or the ASPAT polypeptides, or MYB91 polypeptides, or GASA polypeptides, or AUX/IAA polypeptides, themselves, may find use in breeding programmes in which a DNA marker is identified which may be genetically linked to a gene encoding an ASPAT polypeptide, or an MYB91 polypeptide, or a GASA polypeptide, or an AUX/IAA polypeptide. The nucleic acids/genes, or the ASPAT polypeptides themselves may be used to define a molecular marker. This DNA or protein marker may then be used in breeding programmes to select plants having enhanced yield-related traits as defined hereinabove in the methods of the invention.

[0341] Allelic variants of a nucleic acid/gene encoding an ASPAT polypeptide, or an MYB91 polypeptide, or a GASA polypeptide, or an AUX/IAA polypeptide may also find use in marker-assisted breeding programmes. Such breeding programmes sometimes require introduction of allelic variation by mutagenic treatment of the plants, using for example EMS mutagenesis; alternatively, the programme may start with a collection of allelic variants of so called “natural” origin caused unintentionally. Identification of allelic variants then takes place, for example, by PCR. This is followed by a step for selection of superior allelic variants of the sequence in question and which give increased yield and/or yield-related traits. Selection is typically carried out by monitoring growth performance of plants containing different allelic variants of the sequence in question. Growth performance may be monitored in a greenhouse or in the field. Further optional steps include crossing plants in which the superior allelic variant was identified with another plant. This could be used, for example, to make a combination of interesting phenotypic features.

[0342] Nucleic acids encoding ASPAT polypeptides, or MYB91 polypeptides, or GASA polypeptides, or AUX/IAA polypeptides, may also be used as probes for genetically and physically mapping the genes that they are a part of, and as markers for traits linked to those genes. Such information may be useful in plant breeding in order to develop lines with desired phenotypes. Such use of nucleic acids encoding an ASPAT polypeptide, or an MYB91 polypeptide, or a GASA polypeptide, or an AUX/IAA polypeptide, requires only a nucleic acid sequence of at least 15 nucleotides in length. The encoding nucleic acids may be used as restriction fragment length polymorphism (RFLP) markers. Southern blots (Sambrook J, Fritsch EF and Maniatis T (1989) Molecular Cloning, A Laboratory Manual) of restriction-digested plant genomic DNA may be probed with the encoding nucleic acids encoding an ASPAT polypeptide, or an MYB91 polypeptide, or a GASA polypeptide, or an AUX/IAA polypeptide. The resulting banding patterns may then be subjected to genetic analyses using computer programs such as MapMaker (Lander et al. (1987) Genomics 1: 174-181) in order to construct a genetic map. In addition, the nucleic acids may be used to probe Southern blots containing restriction endonuclease-treated genomic DNAs of a set of individuals representing parent and progeny of a defined genetic cross. Segregation of the DNA polymorphisms is noted and used to calculate the position of the nucleic acid encoding an ASPAT polypeptide, or an MYB91 polypeptide, or a GASA polypeptide, or an AUX/IAA polypeptide, in the genetic map previously obtained using this population (Botstein et al. (1980) Am. J. Hum. Genet. 32:314-331).

[0343] The production and use of plant gene-derived probes for use in genetic mapping is described in Bernatzky and Tanksley (1986) Plant Mol. Biol. Reporter 4: 37-41. Numerous publications describe genetic mapping of specific cDNA clones using the methodology outlined above or variations thereof. For example, F2 intercross populations, backcross populations, randomly mated populations, near isogenic lines, and other sets of individuals may be used for mapping. Such methodologies are well known to those skilled in the art.

[0344] The nucleic acid probes may also be used for physical mapping (i.e., placement of sequences on physical maps; see Hoheisel et al. In: Non-mammalian Genomic Analysis: A Practical Guide, Academic press 1996, pp. 319-346, and references cited therein).

[0345] In another embodiment, the nucleic acid probes may be used in direct fluorescence in situ hybridisation (FISH) mapping (Trask (1991) Trends Genet. 7:149-154). Although current methods of FISH mapping favour use of large clones (several kb to several hundred kb; see Laan et al. (1995) Genome Res. 5:13-20), improvements in sensitivity may allow performance of FISH mapping using shorter probes.

[0346] A variety of nucleic acid amplification-based methods for genetic and physical mapping may be carried out using the nucleic acids. Examples include allele-specific amplification (Kazazian (1989) J. Lab. Clin. Med. 11:95-96), polymorphism of PCR-amplified fragments (CAPS; Sheffield et al. (1993) Genomics 16:325-332), allele-specific ligation (Landegren et al. (1988) Science 241:1077-1080), nucleotide extension reactions (Sokolov (1990) Nucleic Acid Res. 18:3671), Radiation Hybrid Mapping (Walter et al. (1997) Nat. Genet. 7:22-28) and Happy Mapping (Dear and Cook (1989) Nucleic Acid Res. 17:6795-6807). For these methods, the sequence of a nucleic acid is used to design and produce primer pairs for use in the amplification reaction or in primer extension reactions. The design of such primers is well known to those skilled in the art. In methods employing PCR-based genetic mapping, it may be necessary to identify DNA sequence differences between the parents of the mapping cross in the region corresponding to the instant nucleic acid sequence. This, however, is generally not necessary for mapping methods.

[0347] Concerning ASPAT polypeptides, concerning GASA polypeptides, or an AUX/IAA polypeptide, the methods according to the present invention result in plants having enhanced yield-related traits, as described hereinbefore. These traits may also be combined with other economically advantageous traits, such as further yield-enhancing traits, tolerance to other abiotic and biotic stresses, traits modifying various architectural features and/or biochemical and/or physiological features.

[0348] Concerning MYB91 polypeptides, the methods according to the present invention result in plants having increased yield-related traits, as described hereinbefore. These traits may also be combined with other economically advantageous traits, such as further yield-increasing traits, tolerance to abiotic and biotic stresses, tolerance to herbicides, insectides, traits modifying various architectural features and/or biochemical and/or physiological features.

### Items

### 1. Aspartate AminoTransferase (ASPAT)

[0349] 1. A method for enhancing yield-related traits in plants relative to control plants, comprising modulating expression in a plant of a nucleic acid encoding an ASPAT (Aspartate Aminotransferase) polypeptide comprising an Aminotransferase class I and II (Aminotran_{—}1_{—}2) domain (Interpro accession number: IPR004839; pfam accession number: PF00155), and optionally selecting plants having enhanced yield-related traits
[0350] 2. Method according to item 1, wherein said ASPAT polypeptide comprising one or more of the following motifs having at least 50%, 51%, 52%, 53%, 54%, 55%, 56%, 57%, 58%, 59%, 60%, 61%, 62%, 63%, 64%, 65%, 66%, 67%, 68%, 69%, 70%, 71%, 72%, 73%, 74%, 75%, 76%, 77%, 78%, 79%, 80%, 81%, 82%, 83%, 84%, 85%, 86%, 87%, 88%, 89%, 90%, 91%, 92%, 93%, 94%, 95%, 96%, 97%, 98%, 99% or 100% to any one or more of the following motif:

(i)

| | |
|---|---|
| Motif 1: NPTG, | (SEQ ID NO: 207) |
| (ii) | |
| Motif 2: IVLLHACAHNPTGVDPT, | (SEQ ID NO: 208) |
| (iii) | |
| Motif 3: SRLLILCSPSNPTGSVY | (SEQ ID NO: 209) |

wherein any amino acid residue maybe substituted by a conserved amino acid.
[0351] 3. Method according to item 1 or 2, wherein said modulated expression is effected by introducing and expressing in a plant a nucleic acid encoding an ASPAT polypeptide.
[0352] 4. Method according to any one of items 1 to 3, wherein said nucleic acid encoding an ASPAT polypeptide encodes any one of the proteins listed in Table A or is a portion of such a nucleic acid, or a nucleic acid capable of hybridising with such a nucleic acid.
[0353] 5. Method according to any one of items 1 to 4, wherein said nucleic acid sequence encodes an orthologue or paralogue of any of the proteins given in Table A1.
[0354] 6. Method according to any preceding item, wherein said enhanced yield-related traits comprise increased yield, preferably increased biomass and/or increased seed yield relative to control plants.
[0355] 7. Method according to any one of items 1 to 6, wherein said enhanced yield-related traits are obtained under non-stress conditions.
[0356] 8. Method according to any one of items 1 to 6, wherein said enhanced yield-related traits are obtained under conditions of drought stress, salt stress or nitrogen deficiency.
[0357] 9. Method according to any one of items 3 to 8, wherein said nucleic acid is operably linked to a constitutive promoter, preferably to a GOS2 promoter, most preferably to a GOS2 promoter from rice.
[0358] 10. Method according to any one of items 3 to 8, wherein said nucleic acid is operably linked to a green tissue-specific promoter, preferably to a PR promoter, most preferably to a PR promoter from rice.
[0359] 11. Method according to any one of items 1 to 10, wherein said nucleic acid encoding an ASPAT polypeptide is of plant origin, preferably from a dicotyledonous plant, further preferably from the family poaceae, more preferably from the genus Oryza, most preferably from Oryza sativa.
[0360] 12. Plant or part thereof, including seeds, obtainable by a method according to any one of items 1 to 11, wherein said plant or part thereof comprises a recombinant nucleic acid encoding an ASPAT polypeptide.
[0361] 13. Construct comprising:
   [0362] (i) nucleic acid encoding an ASPAT polypeptide as defined in items 1 or 2;
   [0363] (ii) one or more control sequences capable of driving expression of the nucleic acid sequence of (a); and optionally
   [0364] (iii) a transcription termination sequence.
[0365] 14. Construct according to item 13, wherein one of said control sequences is a constitutive promoter, preferably a GOS2 promoter, most preferably a GOS2 promoter from rice.
[0366] 15. Construct according to item 13, wherein one of said control sequences is a green tissue-specific promoter, preferably to a PR promoter, most preferably to a PR promoter from rice.
[0367] 16. Use of a construct according to item 13 to 15 in a method for making plants having increased yield, particularly increased biomass and/or increased seed yield relative to control plants.
[0368] 17. Plant, plant part or plant cell transformed with a construct according to item 13 to 15.
[0369] 18. Method for the production of a transgenic plant having increased yield, particularly increased biomass and/or increased seed yield relative to control plants, comprising:
   [0370] (i) introducing and expressing in a plant a nucleic acid encoding an ASPAT polypeptide as defined in item 1 or 2; and
   [0371] (ii) cultivating the plant cell under conditions promoting plant growth and development.
[0372] 19. Transgenic plant having increased yield, particularly increased biomass and/or increased seed yield, relative to control plants, resulting from modulated expression of a nucleic acid encoding an ASPAT polypeptide as defined in item 1 or 2, or a transgenic plant cell derived from said transgenic plant.
[0373] 20. Transgenic plant according to item 11, 17 or 18, or a transgenic plant cell derived thereof, wherein said plant is a crop plant or a monocot or a cereal, such as rice, maize, wheat, barley, millet, rye, triticale, sorghum emmer, spelt, secale, einkorn, teff, milo and oats.
[0374] 21. Harvestable parts of a plant according to item 20, wherein said harvestable parts are preferably shoot biomass and/or seeds.
[0375] 22. Products derived from a plant according to item 20 and/or from harvestable parts of a plant according to item 21.
[0376] 23. Use of a nucleic acid encoding an ASPAT polypeptide in increasing yield, particularly in increasing seed yield and/or shoot biomass in plants, relative to control plants.
[0377] 24. An isolated nucleic acid molecule selected from:
   [0378] (a) a nucleic acid represented by any one of SEQ ID NO: 81, 147, 153, 183 and 185;
   [0379] (b) the complement of a nucleic acid represented by any one of SEQ ID NO: 81, 147, 153, 183 and 185;
   [0380] (c) a nucleic acid encoding the polypeptide as represented by any one of SEQ ID NO: 82, 148, 154, 184 and 186, preferably as a result of the degeneracy of the genetic code, said isolated nucleic acid can be derived from a polypeptide sequence as represented by any one of SEQ ID NO: 82, 148, 154, 184 and 186 and further preferably confers enhanced yield-related traits relative to control plants;
   [0381] (d) a nucleic acid having, in increasing order of preference at least 30%, 31%, 32%, 33%, 34%, 35%, 36%, 37%, 38%, 39%, 40%, 41%, 42%, 43%, 44%, 45%, 46%, 47%, 48%, 49%, 50%, 51%, 52%, 53%, 54%, 55%, 56%, 57%, 58%, 59%, 60%, 61%, 62%, 63%, 64%, 65%, 66%, 67%, 68%, 69%, 70%, 71%, 72%, 73%, 74%, 75%, 76%, 77%, 78%, 79%, 80%, 81%, 82%, 83%, 84%, 85%, 86%, 87%, 88%, 89%, 90%, 91%, 92%, 93%, 94%, 95%, 96%, 97%, 98%, or 99% sequence identity with any of the nucleic acid sequences of Table A1 and further preferably conferring enhanced yield-related traits relative to control plants;
   [0382] (e) a nucleic acid molecule which hybridizes with a nucleic acid molecule of (i) to (iv) under stringent hybridization conditions and preferably confers enhanced yield-related traits relative to control plants;
   [0383] (f) a nucleic acid encoding an ASPAT polypeptide having, in increasing order of preference, at least 50%, 51%, 52%, 53%, 54%, 55%, 56%, 57%, 58%, 59%, 60%, 61%, 62%, 63%, 64%, 65%, 66%, 67%, 68%, 69%, 70%, 71%, 72%, 73%, 74%, 75%, 76%, 77%, 78%, 79%, 80%, 81%, 82%, 83%, 84%, 85%, 86%, 87%, 88%, 89%, 90%, 91%, 92%, 93%, 94%, 95%, 96%, 97%, 98%, or 99% sequence identity to the amino acid sequence represented by any one of SEQ ID NO: 82, 148, 154, 184 and 186 and any of the other amino acid sequences in Table A1 and preferably conferring enhanced yield-related traits relative to control plants.
[0384] 25. An isolated polypeptide selected from:
   [0385] (i) an amino acid sequence represented by any one of SEQ ID NO: 82, 148, 154, 184 and 186;
   [0386] (ii) an amino acid sequence having, in increasing order of preference, at least 50%, 51%, 52%, 53%, 54%, 55%, 56%, 57%, 58%, 59%, 60%, 61%, 62%, 63%, 64%, 65%, 66%, 67%, 68%, 69%, 70%, 71%, 72%, 73%, 74%, 75%, 76%, 77%, 78%, 79%, 80%, 81%, 82%, 83%, 84%, 85%, 86%, 87%, 88%, 89%, 90%, 91%, 92%, 93%, 94%, 95%, 96%, 97%, 98%, or 99% sequence identity to the amino acid sequence represented by any one of SEQ ID NO: 82, 148, 154, 184 and 186, and any of the other amino acid sequences in Table A and preferably conferring enhanced yield-related traits relative to control plants. (iii) derivatives of any of the amino acid sequences given in (i) or (ii) above.
      2. MYB91 like transcription factor (MYB91)
[0387] 1. A method for increasing yield-related traits in plants relative to control plants, comprising increasing expression in a plant of a nucleic acid sequence encoding a MYB91 like transcription factor (MYB91) polypeptide, which MYB91 polypeptide comprises (i) (i) in increasing order of preference at least 50%, 55%, 60%, 65%, 70%, 75%, 80%, 85%, 90%, 95%, 98%, 99% or more amino acid sequence identity to a MYB DNA binding domain with an InterPro accession number IPR014778, as represented by SEQ ID NO: 269; and (ii) in increasing order of preference at least 50%, 55%, 60%, 65%, 70%, 75%, 80%, 85%, 90%, 95%, 98%, 99% or more amino acid sequence identity to a MYB DNA binding domain with an InterPro accession number IPR014778, as represented by SEQ ID NO: 270; and (iii) in increasing order of preference at least 50%, 55%, 60%, 65%, 70%, 75%, 80%, 85%, 90%, 95%, 98%, 99% or more amino acid sequence identity to a Conserved Domain as represented by SEQ ID NO: 271, and optionally selecting for plants having increased yield-related traits.
[0388] 2. Method according to item 1, wherein said MYB91 polypeptide comprises in increasing order of preference at least 50%, 55%, 60%, 65%, 70%, 75%, 80%, 85%, 90%, 95%, 98%, 99% or more amino acid sequence identity to a polypeptide as represented by SEQ ID NO: 221.
[0389] 3. Method according to item 1, wherein said MYB91 polypeptide comprises in increasing order of preference at least 50%, 55%, 60%, 65%, 70%, 75%, 80%, 85%, 90%, 95%, 98%, 99% or more amino acid sequence identity to any of the polypeptide sequences given in Table A2 herein.
[0390] 4. Method according to item 1, wherein said MYB91 polypeptide, when used in the construction of a phylogenetic tree of MYB DNA-binding domain polypeptides, such as the one depicted in FIG. 4, clusters with the MYB91 group of polypeptides rather than with any other group.
[0391] 5. Method according to any preceding item, wherein said nucleic acid sequence encoding a MYB91 polypeptide is represented by any one of the nucleic acid sequence SEQ ID NOs given in Table A2 or a portion thereof, or a sequence capable of hybridising with any one of the nucleic acid sequences SEQ ID NOs given in Table A2, or to a complement thereof.
[0392] 6. Method according to any preceding item, wherein said nucleic acid sequence encodes an orthologue or paralogue of any of the polypeptide sequence SEQ ID NOs given in Table A2.
[0393] 7. Method according to any preceding item, wherein said increased expression is effected by any one or more of: T-DNA activation tagging, TILLING, or homologous recombination.
[0394] 8. Method according to any preceding item, wherein said increased expression is effected by introducing and expressing in a plant a nucleic acid sequence encoding a MYB91 polypeptide.
[0395] 9. Method according to any preceding item, wherein said increased yield-related trait is one or more of: increased plant height, increased harvest index (HI), and/or increased Thousand Kernel Weight (TKW).
[0396] 10. Method according to any preceding item, wherein said nucleic acid sequence is operably linked to a constitutive promoter.
[0397] 11. Method according to item 10, wherein said constitutive promoter is a GOS2 promoter, preferably a GOS2 promoter from rice, most preferably a GOS2 sequence as represented by SEQ ID NO: 272.
[0398] 12. Method according to any preceding item, wherein said nucleic acid sequence encoding a MYB91 polypeptide is from a plant, further preferably from a dicotyledonous plant, more preferably from the family Salicaceae, most preferably the nucleic acid sequence is from Populus trichocarpa.
[0399] 13. Plants, parts thereof (including seeds), or plant cells obtainable by a method according to any preceding item, wherein said plant, part or cell thereof comprises an isolated nucleic acid transgene encoding a MYB91 polypeptide.
[0400] 14. Construct comprising:
   [0401] (a) a nucleic acid sequence encoding a MYB91 polypeptide as defined in any one of items 1 to 6;
   [0402] (b) one or more control sequences capable of driving expression of the nucleic acid sequence of (a); and optionally
   [0403] (c) a transcription termination sequence.
[0404] 15. Construct according to item 14 wherein said control sequence is a constitutive promoter.
[0405] 16. Construct according to item 15 wherein said constitutive promoter is a GOS2 promoter, preferably a GOS2 promoter from rice, most preferably a GOS2 sequence as represented by SEQ ID NO: 272.
[0406] 17. Use of a construct according to any one of items 14 to 16 in a method for making plants having increased yield-related traits relative to control plants, which increased yield-related traits are one or more of: increased plant height, increased harvest index (HI), and increased Thousand Kernel Weight (TKW).
[0407] 18. Plant, plant part or plant cell transformed with a construct according to any one of items 14 to 16.
[0408] 19. Method for the production of transgenic plants having increased yield-related traits relative to control plants, comprising:
   [0409] (i) introducing and expressing in a plant, plant part, or plant cell, a nucleic acid sequence encoding a MYB91 polypeptide as defined in any one of items 1 to 6; and
   [0410] (ii) cultivating the plant cell, plant part, or plant under conditions promoting plant growth and development.
[0411] 20. Transgenic plant having increased yield-related traits relative to control plants, resulting from increased expression of an isolated nucleic acid sequence encoding a MYB91 polypeptide as defined in any one of items 1 to 6, or a transgenic plant cell or transgenic plant part derived from said transgenic plant.
[0412] 21. Transgenic plant according to item 13, 18, or 20, wherein said plant is a crop plant or a monocot or a cereal, such as rice, maize, wheat, barley, millet, rye, triticale, sorghum and oats, or a transgenic plant cell derived from said transgenic plant.
[0413] 22. Harvestable parts comprising an isolated nucleic acid sequence encoding a MYB91 polypeptide, of a plant according to item 21, wherein said harvestable parts are preferably seeds.
[0414] 23. Products derived from a plant according to item 21 and/or from harvestable parts of a plant according to item 22.
[0415] 24. Use of a nucleic acid sequence encoding a MYB91 polypeptide as defined in any one of items 1 to 6, in increasing yield-related traits, comprising one or more of: increased plant height, increased harvest index (HI), and increased Thousand Kernel Weight (TKW).

### 3. Gibberellic Acid-Stimulated Arabidopsis (GASA)

[0416] 1. A method for enhancing yield-related traits in plants relative to control plants, comprising modulating expression in a plant of a nucleic acid encoding a GASA polypeptide, wherein the sequence of said GASA polypeptide comprises a Pfam PF02704 domain, provided that said GASA protein is not GASA4 as represented by SEQ ID NO: 295.
[0417] 2. Method according to item 1, wherein said GASA polypeptide comprises one or more of the following motifs:

| | |
|---|---|
| (b) Motif 4, | (SEQ ID NO: 277) |
| (c) Motif 5, | (SEQ ID NO: 278) |
| (d) Motif 6 | (SEQ ID NO: 279) |

[0418] 3. Method according to item 1 or 2, wherein said modulated expression is effected by introducing and expressing in a plant a nucleic acid encoding a GASA polypeptide.
[0419] 4. Method according to any one of items 1 to 3, wherein said nucleic acid encoding a GASA polypeptide encodes any one of the proteins listed in Table A3 or is a portion of such a nucleic acid, or a nucleic acid capable of hybridising with such a nucleic acid.
[0420] 5. Method according to any one of items 1 to 4, wherein said nucleic acid sequence encodes an orthologue or paralogue of any of the proteins given in Table A3.
[0421] 6. Method according to any preceding item, wherein said enhanced yield-related traits comprise increased seed yield relative to control plants.
[0422] 7. Method according to any one of items 1 to 6, wherein said enhanced yield-related traits are obtained under non-stress conditions.
[0423] 8. Method according to any one of items 1 to 6, wherein said enhanced yield-related traits are obtained under conditions of drought stress, salt stress or nitrogen deficiency.
[0424] 9. Method according to any one of items 3 to 8, wherein said nucleic acid is operably linked to a constitutive promoter, preferably to a GOS2 promoter, most preferably to a GOS2 promoter from rice.
[0425] 10. Method according to any one of items 1 to 9, wherein said nucleic acid encoding a GASA polypeptide is of plant origin, preferably from a dicotyledonous plant.
[0426] 11. Plant or part thereof, including seeds, obtainable by a method according to any one of items 1 to 10, wherein said plant or part thereof comprises a recombinant nucleic acid encoding a GASA polypeptide.
[0427] 12. Construct comprising:
   [0428] (i) nucleic acid encoding a GASA polypeptide as defined in items 1 or 2;
   [0429] (ii) one or more control sequences capable of driving expression of the nucleic acid sequence of (a); and optionally
   [0430] (iii) a transcription termination sequence.
[0431] 13. Construct according to item 12, wherein one of said control sequences is a constitutive promoter, preferably a GOS2 promoter, most preferably a GOS2 promoter from rice.
[0432] 14. Use of a construct according to item 12 or 13 in a method for making plants having increased yield, particularly increased seed yield relative to control plants.
[0433] 15. Plant, plant part or plant cell transformed with a construct according to item 12 or 13.
[0434] 16. Method for the production of a transgenic plant having increased yield, particularly increased seed yield relative to control plants, comprising:
   [0435] (i) introducing and expressing in a plant a nucleic acid encoding a GASA polypeptide as defined in item 1 or 2; and
   [0436] (ii) cultivating the plant cell under conditions promoting plant growth and development.
[0437] 17. Transgenic plant having increased yield, particularly increased seed yield, relative to control plants, resulting from modulated expression of a nucleic acid encoding GASA polypeptide as defined in item 1 or 2, or a transgenic plant cell derived from said transgenic plant.
[0438] 18. Transgenic plant according to item 11, 15 or 17, or a transgenic plant cell derived thereof, wherein said plant is a crop plant or a monocot or a cereal, such as rice, maize, wheat, barley, millet, rye, triticale, sorghum emmer, spelt, secale, einkorn, teff, milo and oats.
[0439] 19. Harvestable parts of a plant according to item 18, wherein said harvestable parts are seeds.
[0440] 20. Products derived from a plant according to item 18 and/or from harvestable parts of a plant according to item 19.
[0441] 21. Use of a nucleic acid encoding a GASA polypeptide in increasing yield, particularly in increasing seed yield in plants, relative to control plants.

### 4. Auxin/Indoleacetic Acid Genes (AUX/IAA)

[0442] 1. A method for enhancing yield-related traits in plants relative to control plants, comprising modulating expression in a plant of a nucleic acid encoding an AUX/IAA polypeptide comprising an AUX/IAA domain.
[0443] 2. Method according to item 1, wherein said AUX/IAA domain has in increasing order of preference at least 25%, 26%, 27%, 28%, 29%, 30%, 31%, 32%, 33%, 34%, 35%, 36%, 37%, 38%, 39%, 40%, 41%, 42%, 43%, 44%, 45%, 46%, 47%, 48%, 49%, 50%, 51%, 52%, 53%, 54%, 55%, 56%, 57%, 58%, 59%, 60%, 61%, 62%, 63%, 64%, 65%, 66%, 67%, 68%, 69%, 70%, 71%, 72%, 73%, 74%, 75%, 76%, 77%, 78%, 79%, 80%, 81%, 82%, 83%, 84%, 85%, 86%, 87%, 88%, 89%, 90%, 91%, 92%, 93%, 94%, 95%, 96%, 97%, 98%, or 99% sequence identity to the amino acid of an AUX/IAA domain, preferably to the AUX/IAA domain of any of the polypeptides of Table A4, most preferably to the AUX/IAA domain of SEQ ID NO: 432 as represented by the amino acids located between amino acid coordinates 5 to 171.
[0444] 3. Method according to item 1 wherein said AUX/IAA polypeptide is an IAA14-like polypeptide comprises one or more of the following motifs:
   [0445] (i) Motif 13: SEQ ID NO: 739,
   [0446] (ii) Motif 14: SEQ ID NO: 740,
   [0447] (iii) Motif 15: SEQ ID NO: 741,
   [0448] (iv) Motif 16: SEQ ID NO: 742,
   [0449] (v) Motif 17: SEQ ID NO: 743,
   [0450] (vi) Motif 18: SEQ ID NO: 744.
[0451] 4. Method according to item 1 to 3, wherein said modulated expression is effected by introducing and expressing in a plant a nucleic acid encoding an AUX/IAA polypeptide.
[0452] 5. Method according to any one of items 1 to 4, wherein said nucleic acid encoding an AUX/IAA polypeptide encodes any one of the proteins listed in Table A4 or in Table A5 or is a portion of such a nucleic acid, or a nucleic acid capable of hybridising with such a nucleic acid.
[0453] 6. Method according to any one of items 1 to 5, wherein said nucleic acid sequence encodes an orthologue or paralogue of any of the proteins given in Table A4 or in Table A5.
[0454] 7. Method according to any preceding item, wherein said enhanced yield-related traits comprise increased yield, preferably increased biomass and/or increased seed yield relative to control plants.
[0455] 8. Method according to any one of items 1 to 7, wherein said enhanced yield-related traits are obtained under non-stress conditions.
[0456] 9. Method according to any one of items 3 to 8, wherein said nucleic acid is operably linked to a constitutive promoter, preferably to a GOS2 promoter, most preferably to a GOS2 promoter from rice.
[0457] 10. Method according to any one of items 1 to 9, wherein said nucleic acid encoding an AUX/IAA polypeptide is of plant origin, preferably from a monocotyledonous plant, further preferably from the family Poaceae, more preferably from the genus Oryza, most preferably from Oryza sativa.
[0458] 11. Plant or part thereof, including seeds, obtainable by a method according to any one of items 1 to 10, wherein said plant or part thereof comprises a recombinant nucleic acid encoding an AUX/IAA polypeptide.
[0459] 12. Construct comprising:
   [0460] (i) nucleic acid encoding an AUX/IAA polypeptide as defined in items 1 or 2;
   [0461] (ii) one or more control sequences capable of driving expression of the nucleic acid sequence of (a); and optionally
   [0462] (iii) a transcription termination sequence.
[0463] 13. Construct according to item 12, wherein one of said control sequences is a constitutive promoter, preferably a GOS2 promoter, most preferably a GOS2 promoter from rice.
[0464] 14. Use of a construct according to item 12 or 13 in a method for making plants having increased yield, particularly increased biomass and/or increased seed yield relative to control plants.
[0465] 15. Plant, plant part or plant cell transformed with a construct according to item 12 or 13.
[0466] 16. Method for the production of a transgenic plant having increased yield, particularly increased biomass and/or increased seed yield relative to control plants, comprising:
   [0467] (i) introducing and expressing in a plant a nucleic acid encoding an AUX/IAA polypeptide as defined in item 1 or 2; and
   [0468] (ii) cultivating the plant cell under conditions promoting plant growth and development.
[0469] 17. Transgenic plant having increased yield, particularly increased biomass and/or increased seed yield, relative to control plants, resulting from modulated expression of a nucleic acid encoding an AUX/IAA polypeptide as defined in item 1 or 2, or a transgenic plant cell derived from said transgenic plant.
[0470] 18. Transgenic plant according to item 11, 15 or 17, or a transgenic plant cell derived thereof, wherein said plant is a crop plant or a monocot or a cereal, such as rice, maize, wheat, barley, millet, rye, triticale, sorghum emmer, spelt, secale, einkorn, teff, milo and oats.
[0471] 19. Harvestable parts of a plant according to item 18, wherein said harvestable parts are preferably shoot biomass and/or seeds.
[0472] 20. Products derived from a plant according to item 18 and/or from harvestable parts of a plant according to item 19.
[0473] 21. Use of a nucleic acid encoding an AUX/IAA polypeptide in increasing yield, particularly in increasing seed yield and/or shoot biomass in plants, relative to control plants.

### DESCRIPTION OF FIGURES

[0474] The present invention will now be described with reference to the following figures in which:

[0475] FIG. 1 represents a multiple alignment of ASPAT polypeptides.

[0476] FIG. 2 shows a phylogenetic tree of ASPAT polypeptides.

[0477] FIG. 3 represents the binary vector used for increased expression in Oryza sativa of an ASPAT-encoding nucleic acid under the control of a rice GOS2 promoter (pGOS2) or of a rice PR promoter.

[0478] FIG. 4 represents the phylogenetic relationship among MYB DNA binding domain polypeptides from Arabidopsis thaliana and from other plants, based upon amino acid sequence (according to Stracke et al. (2004) Current Opinion in Plant Biology 2001, 4:447-456). The MYB polypeptides were clustered using PHYLIP, and motifs were detected using MEME. Polypeptides useful in performing the methods of the invention cluster with MYB91, circled and marked by a black arrow.

[0479] FIG. 5 shows a ClustalW 1.81 multiple sequence alignment of the MYB91 polypeptides from Table A2. Two MYB DNA binding domains with an InterPro accession number IPR014778, a MYB transcription factor with an InterPro accession number IPR015495, and a C-terminal Conserved Domain, are marked with X's below the consensus sequence.

[0480] FIG. 6 shows the binary vector for increased expression in Oryza sativa plants of a nucleic acid sequence encoding a MYB91 polypeptide under the control of a promoter functioning in plants.

[0481] FIG. 7 represents the domain structure of SEQ ID NO: 276 with the GASA domain PF02704 indicated in bold. The putative secretion signal peptide (amino acid 1-24) is underlined.

[0482] FIG. 8 represents a multiple alignment of various GASA proteins. The motifs 4 to 12 or other motifs can be deduced herefrom.

[0483] FIG. 9 shows a phylogenetic tree of Arabidopsis GASA proteins (Roxrud et al. 2007). Starting from a multiple alignment with ClustalW (Thompson et al., Nucleic Acids Res. 22, 4673-4680, 1994), a neighbour-joining phylogenetic tree was obtained using the PAUP v.4.0 software (http://www.paup. csit.fsu.edu), and statistical confidence was calculated by bootstrap analysis with 1,000 resamplings.

[0484] FIG. 10 represents the binary vector for increased expression in Oryza sativa of a GASA-encoding nucleic acid under the control of a rice GOS2 promoter (pGOS2).

[0485] FIG. 11 represents a multiple alignment of AUX/IAA polypeptides.

[0486] FIG. 12 represents the binary vector used for increased expression in Oryza sativa of an AUX/IAA encoding nucleic acid under the control of a rice GOS2 promoter (pGOS2).

[0487] FIG. 13 represents the domain structure of SEQ ID NO: 738 with the AUX/IAA domain in bold and the conserved motifs underlined.

[0488] FIG. 14 represents a multiple alignment of IAA14-like protein sequences.

[0489] FIG. 15 shows a neighbour-joining tree of Arabidopsis IAA proteins (Remington et al., 2004). SEQ ID NO: 738 is represented by IAA14 in Group A and IAA14-like proteins preferably cluster in this Group A.

[0490] FIG. 16 represents the binary vector used for increased expression in Oryza sativa of an IAA14-like-encoding nucleic acid under the control of a rice HMGP promoter (pHMGP).

### EXAMPLES

[0491] The present invention will now be described with reference to the following examples, which are by way of illustration alone. The following examples are not intended to completely define or otherwise limit the scope of the invention.

[0492] DNA manipulation: unless otherwise stated, recombinant DNA techniques are performed according to standard protocols described in (Sambrook (2001) Molecular Cloning: a laboratory manual, 3rd Edition Cold Spring Harbor Laboratory Press, CSH, New York) or in Volumes 1 and 2 of Ausubel et al. (1994), Current Protocols in Molecular Biology, Current Protocols. Standard materials and methods for plant molecular work are described in Plant Molecular Biology Labfax (1993) by R. D. D. Croy, published by BIOS Scientific Publications Ltd (UK) and Blackwell Scientific Publications (UK).

### Example 1

### Identification of Sequences Related to the Nucleic Acid Sequence Used in the Methods of the Invention

[0493] Sequences (full length cDNA, ESTs or genomic) related to the nucleic acid sequence used in the methods of the present invention were identified amongst those maintained in the Entrez Nucleotides database at the National Center for Biotechnology Information (NCBI) using database sequence search tools, such as the Basic Local Alignment Tool (BLAST) (Altschul et al. (1990) J. Mol. Biol. 215:403-410; and Altschul et al. (1997) Nucleic Acids Res. 25:3389-3402). The program is used to find regions of local similarity between sequences by comparing nucleic acid or polypeptide sequences to sequence databases and by calculating the statistical significance of matches. For example, the polypeptide encoded by the nucleic acid used in the present invention was used for the TBLASTN algorithm, with default settings and the filter to ignore low complexity sequences set off. The output of the analysis was viewed by pairwise comparison, and ranked according to the probability score (E-value), where the score reflect the probability that a particular alignment occurs by chance (the lower the E-value, the more significant the hit). In addition to E-values, comparisons were also scored by percentage identity. Percentage identity refers to the number of identical nucleotides (or amino acids) between the two compared nucleic acid (or polypeptide) sequences over a particular length. In some instances, the default parameters may be adjusted to modify the stringency of the search. For example the E-value may be increased to show less stringent matches. This way, short nearly exact matches may be identified.

### 1.1. Aspartate AminoTransferase (ASPAT)

[0494] Table A1 provides a list of nucleic acid sequences related to the nucleic acid sequence used in the methods of the present invention.

TABLE A1
Examples of ASPAT polypeptides:

| | | | Amino |
|---|---|---|---|
| | | | acid |
| Reference | | Nucleic acid | SEQ ID |
| number | Name | SEQ ID NO: | NO: |
| 1 | O. sativa_Os01g0760600 | 1 | 2 |
| 1 | O. sativa_Os01g0760600- | 3 | 4 |
| | truncated | | |
| 1 | A. thaliana_AT5G19550 | 5 | 6 |
| 1 | A. thaliana_AT5G11520 | 7 | 8 |
| 1 | A. thaliana_AT4G31990 | 9 | 10 |
| 6 | A. thaliana_AT1G62800 | 11 | 12 |
| 7 | B. napus_TA23207 | 13 | 14 |
| 8 | B. napus_TA23768 | 15 | 16 |
| 9 | C. sinensis_TA12564 | 17 | 18 |
| 10 | C. solstitialis_TA659 | 19 | 20 |
| 11 | G. hirsutum_TA23799 | 21 | 22 |
| 12 | G. max_AF034210 | 23 | 24 |
| 13 | G. raimondii_TA9413 | 25 | 26 |
| 14 | H. annuus_TA8926 | 27 | 28 |
| 15 | H. paradoxus_TA2606 | 29 | 30 |
| 16 | J. regia_TA762 | 31 | 32 |
| 17 | L. japonicus_TA1537 | 33 | 34 |
| 18 | L. perennis_TA512 | 35 | 36 |
| 19 | L. perennis_TA605 | 37 | 38 |
| 20 | N. tabacum_TA13125 | 39 | 40 |
| 21 | P. glauca_TA15326 | 41 | 42 |
| 22 | P. patens_136815 | 43 | 44 |
| 23 | P. persica_TA3273 | 45 | 46 |
| 24 | P. sitchensis_TA22265 | 47 | 48 |
| 25 | P. trichocarpa_819551 | 49 | 50 |
| 26 | P. trifoliata_TA8305 | 51 | 52 |
| 27 | S. lycopersicum_TA38054 | 53 | 54 |
| 28 | S. officinarum_TA26595 | 55 | 56 |
| 29 | T. aestivum_TA52678 | 57 | 58 |
| 30 | V. carteri_82929 | 59 | 60 |
| 31 | V. vinifera_GSVIVT00016723001 | 61 | 62 |
| 32 | V. vinifera_GSVIVT00032463001 | 63 | 64 |
| 33 | Z. mays_TA9042 | 65 | 66 |
| 34 | C. reinhardtii_186959 | 67 | 68 |
| 35 | C. solstitialis_TA2275 | 69 | 70 |
| 36 | C. tinctorius_TA12 | 71 | 72 |
| 37 | G. hirsutum_TA24406 | 73 | 74 |
| 38 | G. max_TA61768 | 75 | 76 |
| 39 | G. raimondii_TA9928 | 77 | 78 |
| 40 | H. exilis_TA1663 | 79 | 80 |
| 41 | H. vulgare_BPS_7992 | 81 | 82 |
| 42 | L. japonicus_TA1466 | 83 | 84 |
| 43 | M. polymorpha_TA825 | 85 | 86 |
| 44 | N. tabacum_TA13015 | 87 | 88 |
| 45 | O. sativa_Os02g0797500 | 89 | 90 |
| 46 | P. glauca_TA14780 | 91 | 92 |
| 47 | P. patens_102134 | 93 | 94 |
| 48 | P. sitchensis_TA20968 | 95 | 96 |
| 49 | P. taeda_TA6616 | 97 | 98 |
| 50 | P. trichocarpa_654206 | 99 | 100 |
| 51 | P. trichocarpa_835828 | 101 | 102 |
| 52 | P. vulgaris_TA4043 | 103 | 104 |
| 53 | S. tuberosum_TA23192 | 105 | 106 |
| 54 | V. carteri_81153 | 107 | 108 |
| 55 | V. vinifera_GSVIVT00032723001 | 109 | 110 |
| 56 | Z. mays_TA10886 | 111 | 112 |
| 57 | A. thaliana_AT2G30970 | 113 | 114 |
| 58 | C. sinensis_TA15250 | 115 | 116 |
| 59 | G. max_TA50178 | 117 | 118 |
| 60 | G. raimondii_TA9985 | 119 | 120 |
| 61 | H. vulgare_TA32835 | 121 | 122 |
| 62 | H. vulgare_TA36301 | 123 | 124 |
| 63 | O. lucimarinus_31597 | 125 | 126 |
| 64 | O. sativa_Os02g0236000 | 127 | 128 |
| 65 | O. sativa_Os06g0548000 | 129 | 130 |
| 66 | O. taurii_32764 | 131 | 132 |
| 67 | P. patens_169868 | 133 | 134 |
| 68 | P. sitchensis_TA23007 | 135 | 136 |
| 69 | P. taeda_TA7145 | 137 | 138 |
| 70 | V. vinifera_GSVIVT00018772001 | 139 | 140 |
| 71 | V. vinifera_GSVIVT00037462001 | 141 | 142 |
| 72 | A. anophagefferens_21970 | 143 | 144 |
| 73 | A. thaliana_AT2G22250.2 | 145 | 146 |
| 74 | B. napus_BPS_9867 | 147 | 148 |
| 75 | C. reinhardtii_118364 | 149 | 150 |
| 76 | G. hirsutum_TA27281 | 151 | 152 |
| 77 | G. max_BPS_36342 | 153 | 154 |
| 78 | H. vulgare_TA28738 | 155 | 156 |
| 79 | M. domestica_TA26867 | 157 | 158 |
| 80 | N. tabacum_TA15308 | 159 | 160 |
| 81 | O. basilicum_TA1043 | 161 | 162 |
| 82 | O. sativa_Os01g0871300 | 163 | 164 |
| 83 | P. patens_127152 | 165 | 166 |
| 84 | P. pinaster_TA3616_71647 | 167 | 168 |
| 85 | P. trichocarpa_scaff_V.183 | 169 | 170 |
| 86 | P. trichocarpa_scaff_VII.574 | 171 | 172 |
| 87 | S. lycopersicum_TA37592 | 173 | 174 |
| 88 | S. tuberosum_TA27739 | 175 | 176 |
| 89 | T. aestivum_TA71539 | 177 | 178 |
| 90 | V. carteri_103084 | 179 | 180 |
| 91 | V. vinifera_GSVIVT00019453001 | 181 | 182 |
| 92 | Z. mays_BPS_26636 | 183 | 184 |
| 93 | Z. mays_BPS_4233 | 185 | 186 |

[0495] In some instances, related sequences is tentatively been assembled and publicly disclosed by research institutions, such as The Institute for Genomic Research (TIGR; beginning with TA). The Eukaryotic Gene Orthologs (EGO) database may be used to identify such related sequences, either by keyword search or by using the BLAST algorithm with the nucleic acid sequence or polypeptide sequence of interest. On other instances, special nucleic acid sequence databases have been from particular organisms, such as those maintained by the Joint Genome Institute, like the poplar genome sequences have been screened.

[0496] Further, access to proprietary databases, has allowed the identification of other nucleic acid and polypeptide sequences using the Blast algorithm as described above.

1.2. MYB91 like transcription factor (MYB91)

[0497] Table A2 provides a list of nucleic acid sequences related to the nucleic acid sequence used in the methods of the present invention.

TABLE A2
Examples of MYB91 polypeptide sequences, and encoding nucleic acid
sequences

| | | Nucleic | Poly- |
|---|---|---|---|
| | | acid | peptide |
| | Public database | SEQ ID | SEQ ID |
| Name | accession number | NO: | NO: |
| Poptr_MYB91 | NA | 220 | 221 |
| Antma_MYB91 | AJ005586 | 222 | 223 |
| (PHAN) | | | |
| Aqufo_MYB91 | DR919410 | 224 | 225 |
| | DR919310 | | |
| Arath_MYB91 (AS1) | AT2G37630 | 226 | 227 |
| Brana_MYB91 | BN06MC30974_51405116 | 228 | 229 |
| | @30844#1 | | |
| Carhi_MYB91 | DQ512733 | 230 | 231 |
| Escca_MYB91 | AY228766 | 232 | 233 |
| Eucgr_MYB91 | BD376532 | 234 | 235 |
| Glyma_MYB91 | AY790252 | 236 | 237 |
| (PHANa) | | | |
| Glyma_MYB91 | AY790253 | 238 | 239 |
| (PHANb) | | | |
| Goshi_MYB91 | DT554770 | 240 | 241 |
| | DW499296 | | |
| Lotco_MYB91 | AY790244 | 242 | 243 |
| (PHANa) | | | |
| Lotco_MYB91 | AY790245 | 244 | 245 |
| (PHANb) | | | |
| Lyces_MYB91 | AF148934 | 246 | 247 |
| Maldo_MYB91 | DQ074473 | 248 | 249 |
| Medtr_MYB91 | DQ468322 | 250 | 251 |
| PHAN | | | |
| Moral_MYB91 | EF408927 | 252 | 253 |
| PHAN1 | | | |
| Nicta_MYB91 | AY559043 | 254 | 255 |
| Orysa_MYB91 | Os12g0572000 | 256 | 257 |
| | NM_001073621 | | |
| Pissa_MYB91 | AF299140.2 | 258 | 259 |
| (PHAN1) | | | |
| Soltu_MYB91 | CK274535 | 260 | 261 |
| Vitvi_MYB91 | AM474349 | 262 | 263 |
| Zeama_MYB91 | AF126489 | 264 | 265 |
| (RS2) | | | |
| Horvu_MYB91 | BF617675.2 | 266 | 267 |
| partial | BG343686.1 | | |

[0498] In some instances, related sequences have tentatively been assembled and publicly disclosed by research institutions, such as The Institute for Genomic Research (TIGR; beginning with TA). The Eukaryotic Gene Orthologs (EGO) database may be used to identify such related sequences, either by keyword search or by using the BLAST algorithm with the nucleic acid sequence or polypeptide sequence of interest. On other instances, special nucleic acid sequence databases have been created for particular organisms, such as by the Joint Genome Institute. Further, access to proprietary databases, has allowed the identification of novel nucleic acid and polypeptide sequences.

1.3. Gibberellic Acid-Stimulated Arabidopsis (GASA) Table A3 provides a list of nucleic acid sequences related to the nucleic acid sequence used in the methods of the present invention.

TABLE A3
Examples of GASA polypeptides:

| | Polypeptide | Nucleic acid |
|---|---|---|
| Name | SEQ ID NO | SEQ ID NO |
| Le_GASA growth induced | 276 | 275 |
| Pop_GASA growth regulated | 291 | 361 |
| Mt_GASA growth regulated | 292 | 362 |
| GASA12 At2g30810 | 293 | 363 |
| GASA5 At3g02885 | 294 | 364 |
| GASA4 At5g15230 | 295 | 365 |
| GASA6 At1g74670 | 296 | 366 |
| TA5035_4679#1 | 297 | 367 |
| TA5923_4679#1 | 298 | 368 |
| TA3842_4679#1 | 299 | 369 |
| Os05g0376800#1 | 300 | 370 |
| Os04g0465300#1 | 301 | 371 |
| Os10g0115550#1 | 302 | 372 |
| AK105729#1 | 303 | 373 |
| Os05g0432200#1 | 304 | 374 |
| Os09g0414900#1 | 305 | 375 |
| Os03g0607200#1 | 306 | 376 |
| Os07g0592000#1 | 307 | 377 |
| AK110640#1 | 308 | 378 |
| Os06g0266800#1 | 309 | 379 |
| Os03g0760800#1 | 310 | 380 |
| scaff_205.30#1 | 311 | 381 |
| scaff_II.204#1 | 312 | 382 |
| scaff_II.2330#1 | 313 | 383 |
| scaff_IX.735#1 | 314 | 384 |
| scaff_VI.397#1 | 315 | 385 |
| scaff_XVII.377#1 | 316 | 386 |
| scaff_II.202#1 | 317 | 387 |
| scaff_I.2410#1 | 318 | 388 |
| scaff_I.1483#1 | 319 | 389 |
| scaff_I.1926#1 | 320 | 390 |
| scaff_XII.704#1 | 321 | 391 |
| scaff_40.379#1 | 322 | 392 |
| scaff_41.75#1 | 323 | 393 |
| scaff_XV.507#1 | 324 | 394 |
| scaff_II.2328#1 | 325 | 395 |
| scaff_II.203#1 | 326 | 396 |
| scaff_XIX.758#1 | 327 | 397 |
| TA45751_4081#1 | 328 | 398 |
| TA48119_4081#1 | 329 | 399 |
| TA35962_4081#1 | 330 | 400 |
| BI208422#1 | 331 | 401 |
| BG128975#1 | 332 | 402 |
| TA52374_4081#1 | 333 | 403 |
| TA37180_4081#1 | 334 | 404 |
| BE353147#1 | 335 | 405 |
| TA56938_4081#1 | 336 | 406 |
| BG130916#1 | 337 | 407 |
| TA52635_4081#1 | 338 | 408 |
| TA41886_4081#1 | 339 | 409 |
| TA36295_4081#1 | 340 | 410 |
| TA56201_4081#1 | 341 | 411 |
| AJ785329#1 | 342 | 412 |
| CA725087#1 | 343 | 413 |
| TA69823_4565#1 | 344 | 414 |
| TA53297_4565#1 | 345 | 415 |
| TA101332_4565#1 | 346 | 416 |
| TA66036_4565#1 | 347 | 417 |
| TA100367_4565#1 | 348 | 418 |
| TA92393_4565#1 | 349 | 419 |
| BM136027#1 | 350 | 420 |
| CA705831#1 | 351 | 421 |
| CA593033#1 | 352 | 422 |
| CK153563#1 | 353 | 423 |
| TA66038_4565#1 | 354 | 424 |
| TA52915_4565#1 | 355 | 425 |
| TA69821_4565#1 | 356 | 426 |
| TA95153_4565#1 | 357 | 427 |
| CD899399#1 | 358 | 428 |
| TA77646_4565#1 | 359 | 429 |
| TA51752_4565#1 | 360 | 430 |

[0499] In some instances, related sequences have tentatively been assembled and publicly disclosed by research institutions, such as The Institute for Genomic Research (TIGR). The Eukaryotic Gene Orthologs (EGO) database may be used to identify such related sequences, either by keyword search or by using the BLAST algorithm with the nucleic acid or polypeptide sequence of interest.

### 1.4. Auxin/Indoleacetic Acid Genes (AUX/IAA)

| | Nucleic Acid | | Polypeptide |
|---|---|---|---|
| Nucleic acid name | SEQ ID NO: | Polypeptide name | SEQ ID NO: |
| seqidno01; DNA; Oryza sativa | 431 | seqidno02; PRT; Oryza sativa | 432 |
| seqidno1; DNA; Arabidopsis thaliana | 433 | seqidno2; PRT; Arabidopsis thaliana | 434 |
| seqidno3; DNA; Arabidopsis thaliana | 435 | seqidno4; PRT; Arabidopsis thaliana | 436 |
| seqidno5; DNA; Arabidopsis thaliana | 437 | seqidno6; PRT; Arabidopsis thaliana | 438 |
| seqidno7; DNA; Arabidopsis thaliana | 439 | seqidno8; PRT; Arabidopsis thaliana | 440 |
| seqidno9; DNA; Arabidopsis thaliana | 441 | seqidno10; PRT; Arabidopsis thaliana | 442 |
| seqidno11; DNA; Arabidopsis thaliana | 443 | seqidno12; PRT; Arabidopsis thaliana | 444 |
| seqidno13; DNA; Arabidopsis thaliana | 445 | seqidno14; PRT; Arabidopsis thaliana | 446 |
| seqidno15; DNA; Arabidopsis thaliana | 447 | seqidno16; PRT; Arabidopsis thaliana | 448 |
| seqidno17; DNA; Arabidopsis thaliana | 449 | seqidno18; PRT; Arabidopsis thaliana | 450 |
| seqidno19; DNA; Arabidopsis thaliana | 451 | seqidno20; PRT; Arabidopsis thaliana | 452 |
| seqidno21; DNA; Arabidopsis thaliana | 453 | seqidno22; PRT; Arabidopsis thaliana | 454 |
| seqidno23; DNA; Arabidopsis thaliana | 455 | seqidno24; PRT; Arabidopsis thaliana | 456 |
| seqidno25; DNA; Arabidopsis thaliana | 457 | seqidno26; PRT; Arabidopsis thaliana | 458 |
| seqidno27; DNA; Arabidopsis thaliana | 459 | seqidno28; PRT; Arabidopsis thaliana | 460 |
| seqidno29; DNA; Arabidopsis thaliana | 461 | seqidno30; PRT; Arabidopsis thaliana | 462 |
| seqidno31; DNA; Arabidopsis thaliana | 463 | seqidno32; PRT; Arabidopsis thaliana | 464 |
| seqidno33; DNA; Arabidopsis thaliana | 465 | seqidno34; PRT; Arabidopsis thaliana | 466 |
| seqidno35; DNA; Arabidopsis thaliana | 467 | seqidno36; PRT; Arabidopsis thaliana | 468 |
| seqidno37; DNA; Arabidopsis thaliana | 469 | seqidno38; PRT; Arabidopsis thaliana | 470 |
| seqidno39; DNA; Arabidopsis thaliana | 471 | seqidno40; PRT; Arabidopsis thaliana | 472 |
| seqidno41; DNA; Arabidopsis thaliana | 473 | seqidno42; PRT; Arabidopsis thaliana | 474 |
| seqidno43; DNA; Arabidopsis thaliana | 475 | seqidno44; PRT; Arabidopsis thaliana | 476 |
| seqidno45; DNA; Arabidopsis thaliana | 477 | seqidno46; PRT; Arabidopsis thaliana | 478 |
| seqidno47; DNA; Arabidopsis thaliana | 479 | seqidno48; PRT; Arabidopsis thaliana | 480 |
| seqidno49; DNA; Arabidopsis thaliana | 481 | seqidno50; PRT; Arabidopsis thaliana | 482 |
| seqidno51; DNA; Arabidopsis thaliana | 483 | seqidno52; PRT; Arabidopsis thaliana | 484 |
| seqidno53; DNA; Arabidopsis thaliana | 485 | seqidno54; PRT; Arabidopsis thaliana | 486 |
| seqidno55; DNA; Arabidopsis thaliana | 487 | seqidno56; PRT; Arabidopsis thaliana | 488 |
| seqidno57; DNA; Arabidopsis thaliana | 489 | seqidno58; PRT; Arabidopsis thaliana | 490 |
| seqidno59; DNA; Arabidopsis thaliana | 491 | seqidno60; PRT; Arabidopsis thaliana | 492 |
| seqidno61; DNA; Arabidopsis thaliana | 493 | seqidno62; PRT; Arabidopsis thaliana | 494 |
| seqidno63; DNA; Arabidopsis thaliana | 495 | seqidno64; PRT; Arabidopsis thaliana | 496 |
| seqidno65; DNA; Arabidopsis thaliana | 497 | seqidno66; PRT; Arabidopsis thaliana | 498 |
| seqidno67; DNA; Arabidopsis thaliana | 499 | seqidno68; PRT; Arabidopsis thaliana | 500 |
| seqidno69; DNA; Oryza sativa | 501 | seqidno70; PRT; Oryza sativa | 502 |
| seqidno71; DNA; Oryza sativa | 503 | seqidno72; PRT; Oryza sativa | 504 |
| seqidno73; DNA; Oryza sativa | 505 | seqidno74; PRT; Oryza sativa | 506 |
| seqidno75; DNA; Oryza sativa | 507 | seqidno76; PRT; Oryza sativa | 508 |
| seqidno77; DNA; Oryza sativa | 509 | seqidno78; PRT; Oryza sativa | 510 |
| seqidno79; DNA; Oryza sativa | 511 | seqidno80; PRT; Oryza sativa | 512 |
| seqidno81; DNA; Oryza sativa | 513 | seqidno82; PRT; Oryza sativa | 514 |
| seqidno83; DNA; Oryza sativa | 515 | seqidno84; PRT; Oryza sativa | 516 |
| seqidno85; DNA; Oryza sativa | 517 | seqidno86; PRT; Oryza sativa | 518 |
| seqidno87; DNA; Oryza sativa | 519 | seqidno88; PRT; Oryza sativa | 520 |
| seqidno89; DNA; Oryza sativa | 521 | seqidno90; PRT; Oryza sativa | 522 |
| seqidno91; DNA; Oryza sativa | 523 | seqidno92; PRT; Oryza sativa | 524 |
| seqidno93; DNA; Oryza sativa | 525 | seqidno94; PRT; Oryza sativa | 526 |
| seqidno95; DNA; Oryza sativa | 527 | seqidno96; PRT; Oryza sativa | 528 |
| seqidno97; DNA; Oryza sativa | 529 | seqidno98; PRT; Oryza sativa | 530 |
| seqidno99; DNA; Oryza sativa | 531 | seqidno100; PRT; Oryza sativa | 532 |
| seqidno101; DNA; Oryza sativa | 533 | seqidno102; PRT; Oryza sativa | 534 |
| seqidno103; DNA; Oryza sativa | 535 | seqidno104; PRT; Oryza sativa | 536 |
| seqidno105; DNA; Oryza sativa | 537 | seqidno106; PRT; Oryza sativa | 538 |
| seqidno107; DNA; Oryza sativa | 539 | seqidno108; PRT; Oryza sativa | 540 |
| seqidno109; DNA; Oryza sativa | 541 | seqidno110; PRT; Oryza sativa | 542 |
| seqidno111; DNA; Oryza sativa | 543 | seqidno112; PRT; Oryza sativa | 544 |
| seqidno113; DNA; Oryza sativa | 545 | seqidno114; PRT; Oryza sativa | 546 |
| seqidno115; DNA; Oryza sativa | 547 | seqidno116; PRT; Oryza sativa | 548 |
| seqidno117; DNA; Oryza sativa | 549 | seqidno118; PRT; Oryza sativa | 550 |
| seqidno119; DNA; Oryza sativa | 551 | seqidno120; PRT; Oryza sativa | 552 |
| seqidno121; DNA; Oryza sativa | 553 | seqidno122; PRT; Oryza sativa | 554 |
| seqidno123; DNA; Oryza sativa | 555 | seqidno124; PRT; Oryza sativa | 556 |
| seqidno125; DNA; Oryza sativa | 557 | seqidno126; PRT; Oryza sativa | 558 |
| seqidno127; DNA; Oryza sativa | 559 | seqidno128; PRT; Oryza sativa | 560 |
| seqidno129; DNA; Oryza sativa | 561 | seqidno130; PRT; Oryza sativa | 562 |
| seqidno131; DNA; Oryza sativa | 563 | seqidno132; PRT; Oryza sativa | 564 |
| seqidno133; DNA; Oryza sativa | 565 | seqidno134; PRT; Oryza sativa | 566 |
| seqidno135; DNA; Oryza sativa | 567 | seqidno136; PRT; Oryza sativa | 568 |
| seqidno137; DNA; Oryza sativa | 569 | seqidno138; PRT; Oryza sativa | 570 |
| seqidno139; DNA; Oryza sativa | 571 | seqidno140; PRT; Oryza sativa | 572 |
| seqidno141; DNA; Oryza sativa | 573 | seqidno142; PRT; Oryza sativa | 574 |
| seqidno143; DNA; Oryza sativa | 575 | seqidno144; PRT; Oryza sativa | 576 |
| seqidno145; DNA; Oryza sativa | 577 | seqidno146; PRT; Oryza sativa | 578 |
| seqidno147; DNA; Oryza sativa | 579 | seqidno148; PRT; Oryza sativa | 580 |
| seqidno149; DNA; Oryza sativa | 581 | seqidno150; PRT; Oryza sativa | 582 |
| seqidno151; DNA; Oryza sativa | 583 | seqidno152; PRT; Oryza sativa | 584 |
| seqidno153; DNA; Oryza sativa | 585 | seqidno154; PRT; Oryza sativa | 586 |
| seqidno155; DNA; Oryza sativa | 587 | seqidno156; PRT; Oryza sativa | 588 |
| seqidno157; DNA; Oryza sativa | 589 | seqidno158; PRT; Oryza sativa | 590 |
| seqidno159; DNA; Oryza sativa | 591 | seqidno160; PRT; Oryza sativa | 592 |
| seqidno161; DNA; Oryza sativa | 593 | seqidno162; PRT; Oryza sativa | 594 |
| seqidno163; DNA; Oryza sativa | 595 | seqidno164; PRT; Oryza sativa | 596 |
| seqidno165; DNA; Oryza sativa | 597 | seqidno166; PRT; Oryza sativa | 598 |
| seqidno167; DNA; Oryza sativa | 599 | seqidno168; PRT; Oryza sativa | 600 |
| seqidno169; DNA; Oryza sativa | 601 | seqidno170; PRT; Oryza sativa | 602 |
| seqidno171; DNA; Oryza sativa | 603 | seqidno172; PRT; Oryza sativa | 604 |
| seqidno173; DNA; Oryza sativa | 605 | seqidno174; PRT; Oryza sativa | 606 |
| seqidno175; DNA; Oryza sativa | 607 | seqidno176; PRT; Oryza sativa | 608 |
| seqidno177; DNA; Oryza sativa | 609 | seqidno178; PRT; Oryza sativa | 610 |
| seqidno179; DNA; Oryza sativa | 611 | seqidno180; PRT; Oryza sativa | 612 |
| seqidno181; DNA; Oryza sativa | 613 | seqidno182; PRT; Oryza sativa | 614 |
| seqidno183; DNA; Oryza sativa | 615 | seqidno184; PRT; Oryza sativa | 616 |
| seqidno185; DNA; Oryza sativa | 617 | seqidno186; PRT; Oryza sativa | 618 |
| seqidno187; DNA; Oryza sativa | 619 | seqidno188; PRT; Oryza sativa | 620 |
| seqidno189; DNA; Oryza sativa | 621 | seqidno190; PRT; Oryza sativa | 622 |
| seqidno191; DNA; Oryza sativa | 623 | seqidno192; PRT; Oryza sativa | 624 |
| seqidno193; DNA; Oryza sativa | 625 | seqidno194; PRT; Oryza sativa | 626 |
| seqidno195; DNA; Zea mays | 627 | seqidno196; PRT; Zea mays | 628 |
| seqidno197; DNA; Zea mays | 629 | seqidno198; PRT; Zea mays | 630 |
| seqidno199; DNA; Zea mays | 631 | seqidno200; PRT; Zea mays | 632 |
| seqidno201; DNA; Zea mays | 633 | seqidno202; PRT; Zea mays | 634 |
| seqidno203; DNA; Zea mays | 635 | seqidno204; PRT; Zea mays | 636 |
| seqidno205; DNA; Zea mays | 637 | seqidno206; PRT; Zea mays | 638 |
| seqidno207; DNA; Zea mays | 639 | seqidno208; PRT; Zea mays | 640 |
| seqidno209; DNA; Zea mays | 641 | seqidno210; PRT; Zea mays | 642 |
| seqidno211; DNA; Zea mays | 643 | seqidno212; PRT; Zea mays | 644 |
| seqidno213; DNA; Zea mays | 645 | seqidno214; PRT; Zea mays | 646 |
| seqidno215; DNA; Zea mays | 647 | seqidno216; PRT; Zea mays | 648 |
| seqidno217; DNA; Zea mays | 649 | seqidno218; PRT; Zea mays | 650 |
| seqidno219; DNA; Zea mays | 651 | seqidno220; PRT; Zea mays | 652 |
| seqidno221; DNA; Zea mays | 653 | seqidno222; PRT; Zea mays | 654 |
| seqidno223; DNA; Zea mays | 655 | seqidno224; PRT; Zea mays | 656 |
| seqidno225; DNA; Zea mays | 657 | seqidno226; PRT; Zea mays | 658 |
| seqidno227; DNA; Zea mays | 659 | seqidno228; PRT; Zea mays | 660 |
| seqidno229; DNA; Zea mays | 661 | seqidno230; PRT; Zea mays | 662 |
| seqidno231; DNA; Zea mays | 663 | seqidno232; PRT; Zea mays | 664 |
| seqidno233; DNA; Zea mays | 665 | seqidno234; PRT; Zea mays | 666 |
| seqidno673; DNA; Populus trichocarpa | 673 | seqidno674; PRT; Populus trichocarpa | 674 |
| seqidno675; DNA; Populus trichocarpa | 675 | seqidno676; PRT; Populus trichocarpa | 676 |
| seqidno677; DNA; Populus trichocarpa | 677 | seqidno678; PRT; Populus trichocarpa | 678 |
| seqidno679; DNA; Populus trichocarpa | 679 | seqidno680; PRT; Populus trichocarpa | 680 |
| seqidno681; DNA; Populus trichocarpa | 681 | seqidno682; PRT; Populus trichocarpa | 682 |
| seqidno683; DNA; Populus trichocarpa | 683 | seqidno684; PRT; Populus trichocarpa | 684 |
| seqidno685; DNA; Populus trichocarpa | 685 | seqidno686; PRT; Populus trichocarpa | 686 |
| seqidno687; DNA; Populus trichocarpa | 687 | seqidno688; PRT; Populus trichocarpa | 688 |
| seqidno689; DNA; Populus trichocarpa | 689 | seqidno690; PRT; Populus trichocarpa | 690 |
| seqidno691; DNA; Populus trichocarpa | 691 | seqidno692; PRT; Populus trichocarpa | 692 |
| seqidno693; DNA; Populus trichocarpa | 693 | seqidno694; PRT; Populus trichocarpa | 694 |
| seqidno695; DNA; Populus trichocarpa | 695 | seqidno696; PRT; Populus trichocarpa | 696 |
| seqidno697; DNA; Populus trichocarpa | 697 | seqidno698; PRT; Populus trichocarpa | 698 |
| seqidno699; DNA; Populus trichocarpa | 699 | seqidno700; PRT; Populus trichocarpa | 700 |
| seqidno701; DNA; Populus trichocarpa | 701 | seqidno702; PRT; Populus trichocarpa | 702 |
| seqidno703; DNA; Populus trichocarpa | 703 | seqidno704; PRT; Populus trichocarpa | 704 |
| seqidno705; DNA; Populus trichocarpa | 705 | seqidno706; PRT; Populus trichocarpa | 706 |
| seqidno707; DNA; Populus trichocarpa | 707 | seqidno708; PRT; Populus trichocarpa | 708 |
| seqidno709; DNA; Populus trichocarpa | 709 | seqidno710; PRT; Populus trichocarpa | 710 |
| seqidno711; DNA; Populus trichocarpa | 711 | seqidno712; PRT; Populus trichocarpa | 712 |
| seqidno713; DNA; Populus trichocarpa | 713 | seqidno714; PRT; Populus trichocarpa | 714 |
| seqidno715; DNA; Populus trichocarpa | 715 | seqidno716; PRT; Populus trichocarpa | 716 |
| seqidno717; DNA; Populus trichocarpa | 717 | seqidno718; PRT; Populus trichocarpa | 718 |
| seqidno719; DNA; Populus trichocarpa | 719 | seqidno720; PRT; Populus trichocarpa | 720 |
| seqidno721; DNA; Populus trichocarpa | 721 | seqidno722; PRT; Populus trichocarpa | 722 |
| seqidno723; DNA; Populus trichocarpa | 723 | seqidno724; PRT; Populus trichocarpa | 724 |
| seqidno725; DNA; Populus trichocarpa | 725 | seqidno726; PRT; Populus trichocarpa | 726 |
| seqidno727; DNA; Populus trichocarpa | 727 | seqidno728; PRT; Populus trichocarpa | 728 |
| seqidno729; DNA; Populus trichocarpa | 729 | seqidno730; PRT; Populus trichocarpa | 730 |
| seqidno731; DNA; Populus trichocarpa | 731 | seqidno732; PRT; Populus trichocarpa | 732 |
| seqidno733; DNA; Populus trichocarpa | 733 | seqidno734; PRT; Populus trichocarpa | 734 |
| seqidno735; DNA; Populus trichocarpa | 735 | seqidno736; PRT; Populus trichocarpa | 736 |

### 1.5. IAA14 Polypeptides

[0501] Table A5 provides a list of nucleic acid sequences related to the nucleic acid sequence used in the methods of the present invention.

TABLE A5
Examples of IAA14-like polypeptides:

| | | Polypeptide | Nucleic acid |
|---|---|---|---|
| Plant Source | Name | SEQ ID NO: | SEQ ID NO: |
| Arabidopsis thaliana | AT4G14550.1#1 | 738 | 737 |
| Arabidopsis thaliana | AT3G23050.1#1 | 748 | 783 |
| Arabidopsis thaliana | AT3G23050.2#1 | 749 | 784 |
| Populus trichocarpa | 566151#1 | 750 | 785 |
| Populus trichocarpa | 720961#1 | 751 | 786 |
| Medicago truncatula | TA20354_3880#1 | 752 | 787 |
| Solanum lycopersicum | TA40922_4081#1 | 753 | 788 |
| Arabidopsis thaliana | AT1G04250.1#1 | 754 | 789 |
| Oryza sativa | CB657009#1 | 755 | 790 |
| Oryza sativa | TA41733_4530#1 | 756 | 791 |
| Medicago truncatula | TA20951_3880#1 | 757 | 792 |
| Arabidopsis thaliana | AT3G04730.1#1 | 758 | 793 |
| Solanum lycopersicum | TA48108_4081#1 | 759 | 794 |
| Medicago truncatula | TA27011_3880#1 | 760 | 795 |
| Medicago truncatula | TA22814_3880#1 | 761 | 796 |
| Populus trichocarpa | 643213#1 | 762 | 797 |
| Arabidopsis thaliana | AT3G23030.1#1 | 763 | 798 |
| Arabidopsis thaliana | AT4G14560.1#1 | 764 | 799 |
| Arabidopsis thaliana | AT1G04240.1#1 | 765 | 800 |
| Solanum lycopersicum | TA38817_4081#1 | 766 | 801 |
| Solanum lycopersicum | TA43058_4081#1 | 767 | 802 |
| Populus trichocarpa | 726443#1 | 768 | 803 |
| Populus trichocarpa | 564913#1 | 769 | 804 |
| Populus trichocarpa | 831610#1 | 770 | 805 |
| Populus trichocarpa | 798526#1 | 771 | 806 |
| Medicago truncatula | TA20557_3880#1 | 772 | 807 |
| Medicago truncatula | TA20558_3880#1 | 773 | 808 |
| Populus trichocarpa | 823671#1 | 774 | 809 |
| Populus trichocarpa | 595419#1 | 775 | 810 |
| Medicago truncatula | TA31746_3880#1 | 776 | 811 |
| Solanum lycopersicum | TA42190_4081#1 | 777 | 812 |
| Arabidopsis thaliana | AT4G29080.1#1 | 778 | 813 |
| Medicago truncatula | TA25400_3880#1 | 779 | 814 |
| Populus trichocarpa | 711734#1 | 780 | 815 |
| Populus trichocarpa | 584053#1 | 781 | 816 |
| Medicago truncatula | TA23062_3880#1 | 782 | 817 |

[0502] In some instances, related sequences have tentatively been assembled and publicly disclosed by research institutions, such as The Institute for Genomic Research (TIGR). The Eukaryotic Gene Orthologs (EGO) database may be used to identify such related sequences, either by keyword search or by using the BLAST algorithm with the nucleic acid or polypeptide sequence of interest.

### Example 2

### Alignment of Sequences Related to the Polypeptide Sequences Used in the Methods of the Invention

### 2.1. Aspartate AminoTransferase (ASPAT)

[0503] Alignment of polypeptide sequences was performed using the ClustalW 2.0 algorithm of progressive alignment (Thompson et al. (1997) Nucleic Acids Res 25:4876-4882; Chema et al. (2003). Nucleic Acids Res 31:3497-3500) with standard setting (slow alignment, similarity matrix: Gonnet (or Blosum 62 (if polypeptides are aligned), gap opening penalty 10, gap extension penalty: 0.2). Minor manual editing was done to further optimise the alignment. The ASPAT polypeptides are aligned in FIG. 1.

[0504] A phylogenetic tree of ASPAT polypeptides (FIG. 2) was constructed using a neighbour-joining clustering algorithm as provided in the AlignX programme from the Vector NTI (Invitrogen). The polypeptides clustered in five major phylognetic classes, class 1, class 2, class 3, class 4, and class 5. Table B1 shows the polypeptides found within each of the five classes. The polypeptides of Class 5 were used as an outgroup in the phylogenectic analysis and do not represent ASPAT polypeptides. Therefore polypeptides of Class 5 are not part of the invention herein described. Polypeptides within class 1 and 2 are typically expressed in the cytosol or the chloroplast. Class 5 corresponds to the new class of ASAPT polypeptides defined by De La Torre et al. 2006. Polypeptides within class 4 are typically expressed in the mitochondria.

TABLE B1
Phylogenetic classes of ASPAT polypeptides.

| | | | Phylo- |
|---|---|---|---|
| | Nucleic acid | Amino acid | genetic |
| Name | SEQ ID NO: | SEQ ID NO: | class |
| O. sativa_Os01g0760600 | 1 | 2 | 1 |
| O. sativa_Os01g0760600- | 3 | 4 | 1 |
| truncated | | | |
| A. thaliana_AT5G19550 | 5 | 6 | 1 |
| A. thaliana_AT5G11520 | 7 | 8 | 1 |
| A. thaliana_AT4G31990 | 9 | 10 | 1 |
| A. thaliana_AT1G62800 | 11 | 12 | 1 |
| B. napus_TA23207 | 13 | 14 | 1 |
| B. napus_TA23768 | 15 | 16 | 1 |
| C. sinensis_TA12564 | 17 | 18 | 1 |
| C. solstitialis_TA659 | 19 | 20 | 1 |
| G. hirsutum_TA23799 | 21 | 22 | 1 |
| G. max_AF034210 | 23 | 24 | 1 |
| G. raimondii_TA9413 | 25 | 26 | 1 |
| H. annuus_TA8926 | 27 | 28 | 1 |
| H. paradoxus_TA2606 | 29 | 30 | 1 |
| J. regia_TA762 | 31 | 32 | 1 |
| L. japonicus_TA1537 | 33 | 34 | 1 |
| L. perennis_TA512 | 35 | 36 | 1 |
| L. perennis_TA605 | 37 | 38 | 1 |
| N. tabacum_TA13125 | 39 | 40 | 1 |
| P. glauca_TA15326 | 41 | 42 | 1 |
| P. patens_136815 | 43 | 44 | 1 |
| P. persica_TA3273 | 45 | 46 | 1 |
| P. sitchensis_TA22265 | 47 | 48 | 1 |
| P. trichocarpa_819551 | 49 | 50 | 1 |
| P. trifoliata_TA8305 | 51 | 52 | 1 |
| S. lycopersicum_TA38054 | 53 | 54 | 1 |
| S. officinarum_TA26595 | 55 | 56 | 1 |
| T. aestivum_TA52678 | 57 | 58 | 1 |
| V. carteri_82929 | 59 | 60 | 1 |
| V. vinifera_GSVIVT00016723001 | 61 | 62 | 1 |
| V. vinifera_GSVIVT00032463001 | 63 | 64 | 1 |
| Z. mays_TA9042 | 65 | 66 | 1 |
| C. reinhardtii_186959 | 67 | 68 | 2 |
| C. solstitialis_TA2275 | 69 | 70 | 2 |
| C. tinctorius_TA12 | 71 | 72 | 2 |
| G. hirsutum_TA24406 | 73 | 74 | 2 |
| G. max_TA61768 | 75 | 76 | 2 |
| G. raimondii_TA9928 | 77 | 78 | 2 |
| H. exilis_TA1663 | 79 | 80 | 2 |
| H. vulgare_BPS_7992 | 81 | 82 | 2 |
| L. japonicus_TA1466 | 83 | 84 | 2 |
| M. polymorpha_TA825 | 85 | 86 | 2 |
| N. tabacum_TA13015 | 87 | 88 | 2 |
| O. sativa_Os02g0797500 | 89 | 90 | 2 |
| P. glauca_TA14780 | 91 | 92 | 2 |
| P. patens_102134 | 93 | 94 | 2 |
| P. sitchensis_TA20968 | 95 | 96 | 2 |
| P. taeda_TA6616 | 97 | 98 | 2 |
| P. trichocarpa_654206 | 99 | 100 | 2 |
| P. trichocarpa_835828 | 101 | 102 | 2 |
| P. vulgaris_TA4043 | 103 | 104 | 2 |
| S. tuberosum_TA23192 | 105 | 106 | 2 |
| V. carteri_81153 | 107 | 108 | 2 |
| V. vinifera_GSVIVT00032723001 | 109 | 110 | 2 |
| Z. mays_TA10886 | 111 | 112 | 2 |
| A. thaliana_AT2G30970 | 113 | 114 | 4 |
| C. sinensis_TA15250 | 115 | 116 | 4 |
| G. max_TA50178 | 117 | 118 | 4 |
| G. raimondii_TA9985 | 119 | 120 | 4 |
| H. vulgare_TA32835 | 121 | 122 | 4 |
| H. vulgare_TA36301 | 123 | 124 | 4 |
| O. lucimarinus_31597 | 125 | 126 | 4 |
| O. sativa_Os02g0236000 | 127 | 128 | 4 |
| O. sativa_Os06g0548000 | 129 | 130 | 4 |
| O. taurii_32764 | 131 | 132 | 4 |
| P. patens_169868 | 133 | 134 | 4 |
| P. sitchensis_TA23007 | 135 | 136 | 4 |
| P. taeda_TA7145 | 137 | 138 | 4 |
| V. vinifera_GSVIVT00018772001 | 139 | 140 | 4 |
| V. vinifera_GSVIVT00037462001 | 141 | 142 | 4 |
| A. anophagefferens_21970 | 143 | 144 | 3 |
| A. thaliana_AT2G22250.2 | 145 | 146 | 3 |
| B. napus_BPS_9867 | 147 | 148 | 3 |
| C. reinhardtii_118364 | 149 | 150 | 3 |
| G. hirsutum_TA27281 | 151 | 152 | 3 |
| G. max_BPS_36342 | 153 | 154 | 3 |
| H. vulgare_TA28738 | 155 | 156 | 3 |
| M. domestica_TA26867 | 157 | 158 | 3 |
| N. tabacum_TA15308 | 159 | 160 | 3 |
| O. basilicum_TA1043 | 161 | 162 | 3 |
| O. sativa_Os01g0871300 | 163 | 164 | 3 |
| P. patens_127152 | 165 | 166 | 3 |
| P. pinaster_TA3616_71647 | 167 | 168 | 3 |
| P. trichocarpa_scaff_V.183 | 169 | 170 | 3 |
| P. trichocarpa_scaff_VII.574 | 171 | 172 | 3 |
| S. lycopersicum_TA37592 | 173 | 174 | 3 |
| S. tuberosum_TA27739 | 175 | 176 | 3 |
| T. aestivum_TA71539 | 177 | 178 | 3 |
| V. carteri_103084 | 179 | 180 | 3 |
| V. vinifera_GSVIVT00019453001 | 181 | 182 | 3 |
| Z. mays_BPS_26636 | 183 | 184 | 3 |
| Z. mays_BPS_4233 | 185 | 186 | 3 |
| A. anophagefferens_21841 | 187 | 188 | 5 |
| A. anophagefferens_27031 | 189 | 190 | 5 |
| A. anophagefferens_27395 | 191 | 192 | 5 |
| A. anophagefferens_58638 | 193 | 194 | 5 |
| E. huxleyi_413787 | 195 | 196 | 5 |
| E. huxleyi_437487 | 197 | 198 | 5 |
| E. huxleyi_467854 | 199 | 200 | 5 |
| P. tricornutum_23059 | 201 | 202 | 5 |
| P. tricornutum_23871 | 203 | 204 | 5 |
| T. pseudonana_269248 | 205 | 206 | 5 |

[0505] Alignment of polypeptide sequences was performed using the ClustalW 2.0 algorithm of progressive alignment (Thompson et al. (1997) Nucleic Acids Res 25:4876-4882; Chema et al. (2003). Nucleic Acids Res 31:3497-3500) with standard setting (slow alignment, similarity matrix: Gonnet, gap opening penalty 10, gap extension penalty: 0.2). Minor manual editing was done to further optimise the alignment.

### 2.2. MYB91 Like Transcription Factor (MYB91)

[0506] Mutliple sequence alignment of all the MYB91 polypeptide sequences in Table A2 was performed using the ClsutalW 1.81 algorithm. Results of the alignment are shown in FIG. 5 of the present application. Two MYB DNA binding domains with an InterPro accession number IPR014778, a MYB transcription factor with an InterPro accession number IPR015495, and a C-terminal Conserved Domain, are marked with X's below the consensus sequence.

### 2.3. Gibberellic Acid-Stimulated Arabidopsis (GASA)

[0507] Alignment of polypeptide sequences was performed using the AlignX programme from the Vector NTI (Invitrogen) which is based on the popular Clustal W algorithm of progressive alignment (Thompson et al. (1997) Nucleic Acids Res 25:4876-4882; Chema et al. (2003). Nucleic Acids Res 31:3497-3500). Default values are for the gap open penalty of 10, for the gap extension penalty of 0.1 and the selected weight matrix is Blosum 62 (if polypeptides are aligned). Minor manual editing was done to further optimise the alignment. Sequence conservation among GASA polypeptides is essentially in the C-terminal part of the polypeptides, the N-terminal part usually being more variable in sequence length and composition. The GASA polypeptides are aligned in FIG. 8.

### 2.4. Auxin/Indoleacetic Acid Genes (AUX/IAA)

[0508] Alignment of polypeptide sequences was performed using the AlignX programme from the Vector NTI (Invitrogen), which is based on the ClustalW 2.0 algorithm for progressive alignment (Thompson et al. (1997) Nucleic Acids Res 25:4876-4882; Chema et al. (2003). Nucleic Acids Res 31:3497-3500); Alignment was performed with standard settings: gap opening penalty 10, gap extension penalty: 0.2. Minor manual editing was done to further optimise the alignment. The AUX/IAA polypeptides are aligned (FIG. 11).

[0509] Highly conserved amino acid residues are indicated in the consensus sequence.

### 2.5. IAA14 Polypeptides

[0510] Alignment of polypeptide sequences was performed using the AlignX programme from the Vector NTI (Invitrogen) which is based on the popular Clustal W algorithm of progressive alignment (Thompson et al. (1997) Nucleic Acids Res 25:4876-4882; Chema et al. (2003). Nucleic Acids Res 31:3497-3500). Default values are for the gap open penalty of 10, for the gap extension penalty of 0.1 and the selected weight matrix is Blosum 62 (if polypeptides are aligned). Minor manual editing was done to further optimise the alignment. Sequence conservation among IAA14-like polypeptides is essentially in the C-terminal half of the polypeptides. The IAA14-like polypeptides are aligned in FIG. 14.

### Example 3

### Calculation of Global Percentage Identity Between Polypeptide Sequences Useful in Performing the Methods of the Invention

### 3.1. Aspartate AminoTransferase (ASPAT)

[0511] Global percentages of similarity and identity between full length polypeptide sequences useful in performing the methods of the invention are determined using one of the methods available in the art, the MatGAT (Matrix Global Alignment Tool) software (BMC Bioinformatics. 2003 4:29. MatGAT: an application that generates similarity/identity matrices using protein or DNA sequences. Campanella J J, Bitincka L, Smalley J; software hosted by Ledion Bitincka). MatGAT software generates similarity/identity matrices for DNA or protein sequences without needing pre-alignment of the data. The program performs a series of pair-wise alignments using the Myers and Miller global alignment algorithm (with a gap opening penalty of 12, and a gap extension penalty of 2), calculates similarity and identity using for example Blosum 62 (for polypeptides), and then places the results in a distance matrix. Sequence similarity is shown in the bottom half of the dividing line and sequence identity is shown in the top half of the diagonal dividing line.

[0512] Parameters used in the comparison were:
[0513] Scoring matrix: Blosum62
[0514] First Gap: 12
[0515] Extending gap: 2

[0516] A MATGAT table for local alignment of a specific domain, or data on % identity/similarity between specific domains may also be generated.

### 3.2. MYB91 Like Transcription Factor (MYB91)

[0517] Global percentages of similarity and identity between full length polypeptide sequences useful in performing the methods of the invention were determined using one of the methods available in the art, the MatGAT (Matrix Global Alignment Tool) software (BMC Bioinformatics. 2003 4:29. MatGAT: an application that generates similarity/identity matrices using protein or DNA sequences. Campanella J J, Bitincka L, Smalley J; software hosted by Ledion Bitincka). MatGAT software generates similarity/identity matrices for DNA or protein sequences without needing pre-alignment of the data. The program performs a series of pair-wise alignments using the Myers and Miller global alignment algorithm (with a gap opening penalty of 12, and a gap extension penalty of 2), calculates similarity and identity using for example Blosum 62 (for polypeptides), and then places the results in a distance matrix. Sequence similarity is shown in the bottom half of the dividing line and sequence identity is shown in the top half of the diagonal dividing line.

[0518] Parameters used in the comparison were:
[0519] Scoring matrix: Blosum62
[0520] First Gap: 12
[0521] Extending gap: 2

[0522] Results of the software analysis are shown in Table C1 for the global similarity and identity over the full length of the polypeptide sequences (excluding the partial polypeptide sequences).

[0523] The percentage identity between the full length polypeptide sequences useful in performing the methods of the invention can be as low as 52% amino acid identity compared to SEQ ID NO: 221.

TABLE C1
MatGAT results for global similarity and identity over the full length of the polypeptide sequences of Table A.

| | | 1 | 2 | 3 | 4 | 5 | 6 | 7 | 8 | 9 | 10 | 11 | 12 | 13 | 14 | 15 | 16 | 17 | 18 | 19 | 20 | 21 | 22 | 23 |
|---|---|---|---|---|---|---|---|---|---|---|---|---|---|---|---|---|---|---|---|---|---|---|---|---|
| 1. | Antma_MYB91 | | 72 | 64 | 64 | 63 | 68 | 69 | 70 | 64 | 70 | 66 | 59 | 71 | 73 | 67 | 48 | 73 | 57 | 68 | 71 | 70 | 73 | 58 |
| 2. | Aqufo_MYB91 | 84 | | 70 | 68 | 69 | 79 | 74 | 73 | 69 | 76 | 71 | 62 | 76 | 77 | 72 | 50 | 76 | 58 | 73 | 78 | 75 | 83 | 58 |
| 3. | Arath_MYB91 | 77 | 80 | | 86 | 91 | 64 | 66 | 66 | 61 | 67 | 63 | 59 | 68 | 67 | 66 | 48 | 68 | 52 | 66 | 71 | 67 | 71 | 54 |
| 4. | Brana_MYB91 | 76 | 80 | 92 | | 85 | 63 | 67 | 64 | 62 | 66 | 63 | 59 | 67 | 66 | 65 | 47 | 67 | 52 | 65 | 70 | 66 | 69 | 53 |
| 5. | Carhi_MYB91 | 77 | 81 | 94 | 91 | | 64 | 65 | 64 | 60 | 66 | 62 | 58 | 67 | 66 | 65 | 47 | 67 | 50 | 65 | 69 | 67 | 69 | 52 |
| 6. | Escca_MYB91 | 80 | 86 | 79 | 77 | 78 | | 70 | 71 | 68 | 72 | 69 | 60 | 72 | 76 | 71 | 50 | 73 | 57 | 71 | 73 | 72 | 79 | 56 |
| 7. | Eucgr_MYB91 | 82 | 87 | 80 | 80 | 79 | 83 | | 73 | 68 | 72 | 71 | 64 | 74 | 77 | 71 | 50 | 75 | 54 | 72 | 76 | 74 | 79 | 57 |
| 8. | Glyma_MYB91(a) | 80 | 84 | 79 | 78 | 78 | 81 | 84 | | 77 | 73 | 76 | 67 | 73 | 76 | 89 | 49 | 74 | 55 | 88 | 76 | 72 | 80 | 57 |
| 9. | Glyma_MYB91(b) | 77 | 82 | 76 | 77 | 75 | 78 | 82 | 84 | | 69 | 73 | 71 | 67 | 70 | 77 | 51 | 68 | 52 | 76 | 72 | 67 | 74 | 55 |
| 10. | Goshi_MYB91 | 80 | 87 | 81 | 80 | 79 | 83 | 85 | 83 | 82 | | 72 | 62 | 73 | 77 | 73 | 49 | 73 | 55 | 74 | 79 | 72 | 82 | 54 |
| 11. | Lotco_MYB91(a) | 77 | 83 | 77 | 77 | 77 | 80 | 84 | 84 | 84 | 83 | | 69 | 70 | 73 | 76 | 51 | 72 | 55 | 75 | 73 | 71 | 75 | 56 |
| 12. | Lotco_MYB91(b) | 72 | 75 | 72 | 71 | 71 | 72 | 78 | 78 | 80 | 75 | 80 | | 62 | 65 | 68 | 46 | 64 | 50 | 68 | 65 | 62 | 66 | 51 |
| 13. | Lyces_MYB91 | 82 | 87 | 81 | 80 | 81 | 86 | 86 | 83 | 80 | 83 | 81 | 75 | | 76 | 72 | 49 | 92 | 56 | 73 | 75 | 98 | 80 | 55 |
| 14. | Maldo_MYB91 | 84 | 87 | 79 | 81 | 78 | 84 | 88 | 85 | 83 | 86 | 84 | 79 | 86 | | 74 | 50 | 77 | 58 | 74 | 79 | 76 | 84 | 58 |
| 15. | Medtr_MYB91 | 78 | 84 | 79 | 78 | 78 | 82 | 83 | 93 | 85 | 83 | 86 | 79 | 83 | 84 | | 49 | 72 | 55 | 96 | 76 | 71 | 78 | 57 |
| 16. | Moral_MYB91 | 63 | 64 | 64 | 65 | 64 | 63 | 65 | 63 | 63 | 62 | 63 | 59 | 63 | 62 | 62 | | 49 | 46 | 49 | 52 | 49 | 50 | 44 |
| 17. | Nicta_MYB91 | 83 | 87 | 80 | 80 | 79 | 84 | 86 | 84 | 81 | 83 | 80 | 76 | 95 | 86 | 82 | 63 | | 55 | 73 | 76 | 92 | 81 | 56 |
| 18. | Orysa_MYB91 | 75 | 75 | 71 | 71 | 69 | 74 | 74 | 70 | 71 | 74 | 73 | 71 | 73 | 75 | 71 | 62 | 72 | | 56 | 54 | 55 | 57 | 62 |
| 19. | Pissa_MYB91 | 79 | 85 | 80 | 79 | 78 | 82 | 83 | 92 | 85 | 83 | 85 | 79 | 83 | 84 | 98 | 63 | 83 | 72 | | 76 | 72 | 79 | 57 |
| 20. | Poptr_MYB91 | 81 | 87 | 83 | 82 | 81 | 84 | 87 | 86 | 82 | 87 | 83 | 75 | 87 | 87 | 85 | 65 | 87 | 73 | 85 | | 74 | 86 | 56 |
| 21. | Soltu_MYB91 | 83 | 86 | 80 | 80 | 80 | 85 | 86 | 82 | 80 | 82 | 83 | 75 | 98 | 86 | 82 | 64 | 95 | 72 | 82 | 86 | | 80 | 55 |
| 22. | Vitvi_MYB91 | 84 | 91 | 83 | 82 | 82 | 88 | 89 | 88 | 84 | 90 | 85 | 77 | 88 | 90 | 87 | 64 | 89 | 75 | 87 | 93 | 88 | | 59 |
| 23. | Zeama_MYB91 | 73 | 71 | 71 | 70 | 69 | 70 | 72 | 73 | 70 | 70 | 71 | 65 | 71 | 71 | 71 | 64 | 72 | 73 | 71 | 73 | 70 | 71 | |

[0524] The percentage amino acid identity can be significantly increased if the most conserved region of the polypeptides are compared. For example, when comparing the amino acid sequence of a MYB DNA transcription factor with an InterPro entry IPR015495 as represented by SEQ ID NO: 268, or of a MYB DNA binding domain with an InterPro accession number IPR014778 as represented by SEQ ID NO: 269 and/or 270, or of a C-terminal conserved domain as represented by SEQ ID NO: 271 with the respective corresponding domains of the polypeptides of Table A1, the percentage amino acid identity increases significantly (in order of preference at least 50%, 55%, 60%, 65%, 70%, 75%, 80%, 85%, 90%, 95%, 98%, 99% or more amino acid sequence identity).

### 3.3. Gibberellic Acid-Stimulated Arabidopsis (GASA)

[0525] Global percentages of similarity and identity between full length polypeptide sequences useful in performing the methods of the invention were determined using one of the methods available in the art, the MatGAT (Matrix Global Alignment Tool) software (BMC Bioinformatics. 2003 4:29. MatGAT: an application that generates similarity/identity matrices using protein or DNA sequences. Campanella J J, Bitincka L, Smalley J; software hosted by Ledion Bitincka). MatGAT software generates similarity/identity matrices for DNA or protein sequences without needing pre-alignment of the data. The program performs a series of pair-wise alignments using the Myers and Miller global alignment algorithm (with a gap opening penalty of 12, and a gap extension penalty of 2), calculates similarity and identity using for example Blosum 62 (for polypeptides), and then places the results in a distance matrix. Sequence similarity is shown in the bottom half of the dividing line and sequence identity is shown in the top half of the diagonal dividing line.

[0526] Parameters used in the comparison were:
[0527] Scoring matrix: Blosum62
[0528] First Gap: 12
[0529] Extending gap: 2

[0530] Results of the software analysis are shown in Table C2 for the global similarity and identity over the full length of the polypeptide sequences. Percentage identity is given above the diagonal and percentage similarity is given below the diagonal.

[0531] The percentage identity between the GASA polypeptide sequences useful in performing the methods of the invention can be as low as 22.2% amino acid identity compared to SEQ ID NO: 276.

TABLE C2
MatGAT results for global similarity and identity over the full length of the polypeptide sequences.

| | | 1 | 2 | 3 | 4 | 5 | 6 | 7 | 8 | 9 | 10 | 11 | 12 | 13 |
|---|---|---|---|---|---|---|---|---|---|---|---|---|---|---|
| 1. | TA5035_4679 | | 42.0 | 35.5 | 27.6 | 35.0 | 29.9 | 35.9 | 52.1 | 33.0 | 28.2 | 35.9 | 64.3 | 36.6 |
| 2. | TA5923_4679 | 52.1 | | 48.0 | 34.2 | 35.6 | 32.0 | 33.3 | 47.1 | 31.1 | 28.1 | 33.3 | 40.8 | 36.1 |
| 3. | Os05g0376800 | 40.8 | 55.9 | | 28.8 | 26.7 | 28.4 | 27.6 | 38.6 | 23.2 | 26.6 | 27.6 | 34.2 | 23.9 |
| 4. | Os04g0465300 | 37.1 | 47.1 | 40.1 | | 24.2 | 33.1 | 37.4 | 28.8 | 30.6 | 35.1 | 37.4 | 29.5 | 33.0 |
| 5. | Os10g0115550 | 42.7 | 49.6 | 42.1 | 35.0 | | 30.7 | 33.3 | 34.6 | 23.7 | 29.4 | 32.5 | 36.8 | 30.5 |
| 6. | AK105729 | 34.2 | 42.0 | 38.8 | 45.3 | 49.6 | | 34.2 | 32.8 | 42.0 | 33.1 | 34.2 | 29.1 | 79.5 |
| 7. | Os05g0432200 | 44.6 | 44.5 | 34.9 | 47.6 | 47.0 | 48.7 | | 33.3 | 37.9 | 34.0 | 98.9 | 38.0 | 42.1 |
| 8. | Os09g0414900 | 57.3 | 57.1 | 48.7 | 43.6 | 55.6 | 41.9 | 41.0 | | 29.2 | 31.1 | 33.3 | 47.0 | 35.0 |
| 9. | Os03g0607200 | 41.5 | 42.0 | 30.9 | 38.1 | 37.6 | 52.1 | 52.1 | 40.2 | | 37.7 | 37.9 | 31.9 | 52.6 |
| 10. | Os07g0592000 | 38.2 | 37.8 | 33.6 | 47.6 | 40.2 | 42.7 | 43.1 | 41.0 | 53.9 | | 34.0 | 31.1 | 40.0 |
| 11. | AK110640 | 43.5 | 44.5 | 34.9 | 47.6 | 46.2 | 48.7 | 98.9 | 41.0 | 52.1 | 43.1 | | 38.0 | 42.1 |
| 12. | Os06g0266800 | 73.8 | 46.2 | 38.2 | 36.2 | 44.4 | 30.8 | 44.6 | 53.0 | 40.4 | 36.3 | 43.5 | | 35.4 |
| 13. | Os03g0760800 | 43.0 | 46.2 | 31.6 | 46.7 | 44.4 | 79.5 | 59.1 | 41.0 | 64.9 | 51.0 | 59.1 | 40.9 | |
| 14. | scaff_205.30 | 41.2 | 43.7 | 38.2 | 49.5 | 39.3 | 47.9 | 46.1 | 47.9 | 52.9 | 53.9 | 46.1 | 37.3 | 55.9 |
| 15. | scaff_II.204 | 35.6 | 45.4 | 37.5 | 53.3 | 42.7 | 49.6 | 60.4 | 42.7 | 48.5 | 46.1 | 59.4 | 37.6 | 56.4 |
| 16. | scaff_II.2330 | 46.3 | 52.1 | 45.4 | 43.0 | 52.1 | 43.0 | 38.0 | 48.8 | 33.9 | 35.5 | 38.0 | 43.0 | 38.0 |
| 17. | scaff_VI.397 | 60.0 | 62.2 | 49.3 | 48.6 | 49.6 | 45.3 | 43.0 | 54.7 | 43.0 | 41.2 | 42.0 | 59.0 | 48.0 |
| 18. | scf_XVII.377 | 63.6 | 55.5 | 48.0 | 45.8 | 50.4 | 40.2 | 44.9 | 64.1 | 41.1 | 46.7 | 43.9 | 55.1 | 43.9 |
| 19. | scaff_II.202 | 38.9 | 47.1 | 32.2 | 56.2 | 42.7 | 51.3 | 64.2 | 37.6 | 49.5 | 44.1 | 63.2 | 37.9 | 61.1 |
| 20. | scaff_I.2410 | 44.8 | 41.2 | 30.3 | 40.0 | 42.7 | 47.9 | 53.3 | 38.5 | 53.2 | 48.0 | 52.2 | 47.1 | 57.0 |
| 21. | scaff_I.1483 | 54.9 | 68.1 | 55.3 | 45.1 | 54.7 | 41.0 | 43.4 | 59.8 | 39.8 | 36.3 | 42.5 | 54.0 | 45.1 |
| 22. | scaff_I.1926 | 18.4 | 26.1 | 30.6 | 26.1 | 22.4 | 22.4 | 22.0 | 23.3 | 21.2 | 20.0 | 21.6 | 18.0 | 19.2 |
| 23. | scaff_XII.704 | 43.6 | 27.7 | 22.4 | 41.9 | 30.8 | 38.5 | 47.8 | 23.9 | 39.4 | 33.3 | 46.7 | 36.9 | 48.4 |
| 24. | scaff_41.75 | 49.5 | 41.2 | 30.9 | 48.6 | 44.4 | 50.4 | 73.9 | 40.2 | 51.1 | 45.1 | 72.8 | 44.0 | 62.4 |
| 25. | scaff_40.379 | 48.9 | 43.7 | 32.2 | 43.8 | 45.3 | 53.0 | 56.5 | 44.4 | 64.9 | 57.8 | 55.4 | 45.5 | 67.7 |
| 26. | scaff_XV.507 | 39.8 | 39.5 | 28.3 | 48.6 | 37.6 | 41.9 | 55.9 | 36.8 | 42.6 | 44.1 | 54.8 | 38.7 | 52.7 |
| 27. | scaff_II.203 | 43.6 | 29.4 | 24.3 | 36.2 | 32.5 | 38.5 | 54.3 | 28.2 | 40.4 | 34.3 | 53.3 | 41.7 | 47.3 |
| 28. | scaff_II.2328 | 58.9 | 56.3 | 43.4 | 45.7 | 53.8 | 47.0 | 55.8 | 53.0 | 45.3 | 44.1 | 55.8 | 56.8 | 54.7 |
| 29. | scaff_XIX.758 | 44.8 | 39.5 | 30.9 | 42.9 | 41.9 | 41.0 | 53.3 | 38.5 | 47.9 | 39.2 | 52.2 | 43.7 | 44.1 |
| 30. | TA45751_4081 | 47.4 | 32.8 | 23.7 | 32.4 | 33.3 | 41.0 | 44.6 | 34.2 | 46.8 | 44.1 | 44.6 | 45.2 | 51.6 |
| 31. | TA48119_4081 | 25.3 | 37.7 | 39.5 | 41.8 | 39.0 | 39.7 | 37.0 | 37.7 | 33.6 | 32.2 | 36.3 | 24.7 | 37.7 |
| 32. | TA35962_4081 | 37.5 | 47.1 | 36.2 | 49.5 | 44.4 | 47.0 | 61.5 | 42.7 | 48.1 | 43.3 | 60.6 | 38.5 | 52.9 |
| 33. | BI208422 | 65.4 | 50.4 | 40.8 | 40.0 | 46.2 | 36.8 | 43.5 | 48.7 | 40.4 | 43.1 | 43.5 | 63.1 | 46.2 |
| 34. | BG128975 | 51.8 | 64.7 | 50.0 | 50.0 | 58.1 | 44.4 | 44.6 | 62.4 | 40.2 | 35.7 | 43.8 | 50.9 | 43.8 |
| 35. | TA52374_4081 | 36.6 | 46.2 | 35.5 | 53.6 | 47.0 | 47.9 | 58.0 | 46.2 | 46.4 | 44.6 | 57.1 | 39.3 | 52.7 |
| 36. | TA37180_4081 | 57.3 | 55.5 | 45.4 | 45.7 | 50.4 | 43.6 | 49.0 | 53.0 | 42.7 | 49.0 | 49.0 | 56.3 | 50.0 |
| 37. | BE353147 | 39.2 | 44.5 | 37.5 | 59.0 | 36.8 | 49.6 | 59.8 | 40.2 | 47.1 | 41.2 | 58.8 | 37.3 | 52.9 |
| 38. | TA56938_4081 | 62.5 | 60.5 | 46.7 | 49.5 | 47.9 | 41.9 | 48.1 | 60.7 | 42.3 | 49.0 | 47.1 | 55.8 | 50.0 |
| 39. | BG130916 | 70.5 | 48.7 | 38.2 | 40.0 | 39.3 | 36.8 | 40.2 | 46.2 | 36.2 | 37.3 | 39.1 | 59.5 | 45.2 |
| 40. | SEQ ID NO: 276 | 51.8 | 68.1 | 50.7 | 48.2 | 52.1 | 44.4 | 45.6 | 58.1 | 44.7 | 42.1 | 44.7 | 50.0 | 45.6 |
| 41. | TA41886_4081 | 37.9 | 45.4 | 34.9 | 59.0 | 35.9 | 52.1 | 58.3 | 38.5 | 45.6 | 39.8 | 58.3 | 37.9 | 56.3 |
| 42. | TA36295_4081 | 46.6 | 45.4 | 35.5 | 49.5 | 47.0 | 41.0 | 53.4 | 41.9 | 47.6 | 45.6 | 52.4 | 41.7 | 55.3 |
| 43. | TA56201_4081 | 50.0 | 44.5 | 36.2 | 47.6 | 41.9 | 41.0 | 43.6 | 47.0 | 44.7 | 45.1 | 43.6 | 43.6 | 51.1 |
| 44. | AJ785329 | 52.6 | 31.9 | 24.3 | 26.7 | 29.1 | 23.9 | 30.4 | 34.2 | 26.6 | 28.4 | 30.4 | 47.6 | 30.1 |
| 45. | CA725087 | 49.1 | 54.6 | 41.4 | 37.9 | 49.6 | 36.8 | 41.4 | 56.4 | 35.3 | 42.2 | 41.4 | 55.2 | 39.7 |
| 46. | TA69823_4565 | 24.4 | 30.3 | 29.9 | 25.4 | 29.4 | 33.3 | 25.4 | 27.9 | 28.4 | 38.8 | 25.4 | 20.4 | 28.4 |
| 47. | TA53297_4565 | 43.5 | 42.9 | 32.9 | 50.5 | 46.2 | 47.0 | 87.0 | 37.6 | 48.9 | 36.3 | 85.9 | 46.7 | 58.1 |
| 48. | TA101332_4565 | 50.5 | 55.5 | 40.1 | 47.6 | 63.2 | 47.9 | 55.3 | 56.4 | 45.6 | 47.6 | 54.4 | 48.5 | 50.5 |
| 49. | TA66036_4565 | 44.7 | 44.5 | 34.9 | 47.6 | 39.3 | 73.5 | 59.6 | 40.2 | 63.8 | 53.9 | 59.6 | 42.6 | 90.4 |
| 50. | TA100367_4565 | 55.3 | 49.6 | 45.4 | 44.7 | 47.9 | 37.6 | 40.4 | 59.0 | 36.8 | 42.1 | 39.5 | 62.3 | 38.6 |
| 51. | TA92393_4565 | 60.4 | 55.5 | 42.1 | 43.8 | 51.3 | 41.0 | 48.5 | 58.1 | 42.6 | 48.0 | 48.5 | 73.3 | 44.6 |
| 52. | BM136027 | 43.6 | 45.4 | 34.2 | 47.6 | 40.2 | 72.6 | 58.5 | 40.2 | 62.8 | 55.9 | 58.5 | 42.6 | 89.4 |
| 53. | CA705831 | 33.6 | 42.0 | 32.2 | 38.1 | 47.9 | 65.0 | 44.2 | 41.0 | 48.7 | 43.4 | 44.2 | 35.4 | 69.0 |
| 54. | CA593033 | 29.7 | 38.3 | 31.6 | 35.2 | 41.4 | 60.2 | 40.6 | 36.7 | 44.5 | 40.6 | 40.6 | 28.1 | 61.7 |
| 55. | CK153563 | 60.6 | 53.8 | 40.8 | 41.9 | 49.6 | 38.5 | 52.1 | 57.3 | 44.7 | 45.1 | 52.1 | 68.1 | 47.9 |
| 56. | TA66038_4565 | 40.8 | 45.4 | 33.6 | 42.9 | 38.5 | 70.9 | 58.2 | 41.0 | 63.3 | 52.0 | 58.2 | 41.8 | 85.7 |
| 57. | TA52915_4565 | 43.5 | 41.2 | 32.2 | 51.4 | 45.3 | 46.2 | 85.9 | 38.5 | 47.9 | 36.3 | 84.8 | 46.7 | 58.1 |
| 58. | TA69821_4565 | 41.1 | 41.2 | 38.2 | 40.2 | 47.0 | 46.2 | 46.7 | 44.4 | 49.5 | 75.7 | 46.7 | 34.6 | 50.5 |
| 59. | TA95153_4565 | 30.8 | 38.7 | 34.9 | 41.0 | 39.3 | 40.2 | 47.0 | 36.8 | 39.3 | 36.8 | 46.2 | 35.9 | 41.9 |
| 60. | CD899399 | 39.8 | 44.5 | 32.9 | 42.9 | 38.5 | 73.5 | 57.1 | 40.2 | 62.2 | 52.9 | 57.1 | 39.8 | 88.8 |
| 61. | TA77646_4565 | 61.6 | 57.1 | 43.4 | 44.8 | 51.3 | 38.5 | 50.5 | 59.0 | 41.4 | 50.0 | 50.5 | 70.7 | 48.5 |
| 62. | TA51752_4565 | 29.5 | 39.5 | 37.5 | 34.9 | 34.9 | 42.6 | 44.2 | 38.8 | 38.8 | 35.7 | 43.4 | 31.0 | 38.0 |
| 63. | Pop_GASA | 49.4 | 43.7 | 32.2 | 42.9 | 43.6 | 48.7 | 53.3 | 42.7 | 58.5 | 52.0 | 52.2 | 47.2 | 60.2 |
| 64. | Mt_GASA | 36.6 | 43.7 | 36.8 | 50.9 | 47.9 | 45.3 | 50.0 | 42.7 | 50.0 | 44.6 | 49.1 | 36.6 | 48.2 |
| 65. | At2g30810 | 57.5 | 61.3 | 45.4 | 50.9 | 55.6 | 45.3 | 43.4 | 60.7 | 39.6 | 45.3 | 42.5 | 51.9 | 46.2 |
| 66. | At3g02885 | 62.9 | 58.0 | 46.1 | 46.7 | 54.7 | 44.4 | 54.6 | 57.3 | 47.4 | 48.0 | 53.6 | 59.8 | 50.5 |
| 67. | At5g15230 | 57.5 | 53.8 | 40.8 | 43.4 | 52.1 | 42.7 | 44.3 | 55.6 | 42.5 | 43.4 | 43.4 | 54.7 | 43.4 |
| 68. | At1g74670 | 62.4 | 60.5 | 45.4 | 45.7 | 49.6 | 40.2 | 52.5 | 57.3 | 41.6 | 49.0 | 51.5 | 58.4 | 44.6 |
| | | 14 | 15 | 16 | 17 | 18 | 19 | 20 | 21 | 22 | 23 | 24 | 25 | 26 |
| 1. | TA5035_4679 | 31.1 | 29.7 | 38.8 | 51.0 | 56.1 | 31.6 | 34.5 | 48.7 | 12.2 | 36.7 | 37.6 | 37.5 | 32.3 |
| 2. | TA5923_4679 | 34.2 | 36.1 | 43.8 | 55.5 | 46.2 | 37.0 | 28.6 | 54.6 | 17.6 | 22.5 | 29.4 | 31.1 | 27.5 |
| 3. | Os05g0376800 | 28.3 | 28.3 | 36.8 | 42.8 | 38.2 | 26.3 | 22.4 | 49.3 | 22.0 | 18.3 | 23.0 | 24.3 | 21.6 |
| 4. | Os04g0465300 | 34.3 | 39.0 | 32.8 | 32.4 | 33.6 | 42.9 | 28.6 | 31.6 | 21.4 | 36.2 | 34.0 | 32.4 | 39.0 |
| 5. | Os10g0115550 | 27.4 | 28.6 | 35.6 | 39.0 | 38.3 | 31.9 | 32.5 | 34.9 | 14.0 | 27.1 | 32.5 | 34.2 | 32.2 |
| 6. | AK105729 | 39.3 | 36.0 | 31.0 | 32.5 | 32.5 | 41.5 | 40.2 | 30.6 | 16.3 | 30.5 | 41.0 | 47.0 | 33.9 |
| 7. | Os05g0432200 | 34.3 | 49.0 | 28.9 | 34.0 | 34.6 | 53.1 | 38.0 | 32.7 | 18.0 | 43.0 | 59.8 | 41.3 | 48.4 |
| 8. | Os09g0414900 | 32.5 | 29.9 | 38.8 | 45.3 | 52.1 | 29.1 | 29.1 | 48.7 | 16.3 | 20.3 | 30.8 | 33.3 | 25.4 |
| 9. | Os03g0607200 | 37.1 | 35.6 | 25.8 | 27.1 | 28.2 | 37.8 | 38.3 | 29.3 | 14.5 | 31.6 | 35.1 | 47.9 | 33.3 |
| 10. | Os07g0592000 | 39.3 | 33.0 | 29.3 | 30.8 | 33.6 | 35.0 | 35.0 | 27.0 | 14.6 | 24.5 | 31.1 | 42.7 | 31.7 |
| 11. | AK110640 | 34.3 | 48.0 | 28.9 | 34.0 | 34.6 | 52.1 | 38.0 | 32.7 | 17.6 | 41.9 | 58.7 | 41.3 | 47.3 |
| 12. | Os06g0266800 | 32.4 | 29.8 | 38.8 | 51.0 | 49.5 | 32.6 | 35.6 | 50.4 | 13.5 | 32.9 | 37.4 | 39.8 | 34.4 |
| 13. | Os03g0760800 | 44.9 | 43.3 | 30.6 | 35.9 | 34.2 | 44.9 | 47.3 | 33.6 | 13.7 | 38.3 | 51.1 | 60.6 | 39.6 |
| 14. | scaff_205.30 | | 35.9 | 28.9 | 33.0 | 36.1 | 37.3 | 49.0 | 33.6 | 16.7 | 26.2 | 32.4 | 54.9 | 31.1 |
| 15. | scaff_II.204 | 44.1 | | 29.8 | 31.7 | 31.8 | 77.2 | 31.7 | 37.4 | 19.6 | 39.2 | 43.6 | 34.7 | 49.0 |
| 16. | scaff_II.2330 | 38.0 | 37.2 | | 39.7 | 40.5 | 28.9 | 24.8 | 41.3 | 17.1 | 23.8 | 30.6 | 30.6 | 25.4 |
| 17. | scaff_VI.397 | 46.1 | 47.5 | 47.1 | | 49.5 | 35.0 | 32.0 | 61.4 | 18.4 | 27.7 | 36.3 | 37.0 | 26.7 |
| 18. | scf_XVII.377 | 53.3 | 48.6 | 45.5 | 60.7 | | 33.6 | 29.9 | 54.0 | 13.5 | 25.0 | 34.6 | 38.9 | 33.3 |
| 19. | scaff_II.202 | 45.1 | 85.1 | 32.2 | 47.0 | 43.0 | | 33.3 | 33.6 | 18.0 | 46.9 | 47.4 | 36.1 | 53.1 |
| 20. | scaff_I.2410 | 55.9 | 43.6 | 40.5 | 44.0 | 45.8 | 46.3 | | 31.0 | 14.3 | 30.7 | 36.3 | 62.5 | 35.7 |
| 21. | scaff_I.1483 | 46.0 | 48.7 | 52.1 | 64.6 | 62.8 | 44.2 | 45.1 | | 15.5 | 24.6 | 33.6 | 36.3 | 30.7 |
| 22. | scaff_I.1926 | 22.4 | 24.9 | 22.4 | 23.3 | 21.2 | 21.2 | 20.4 | 24.5 | | 19.2 | 15.9 | 15.5 | 21.5 |
| 23. | scaff_XII.704 | 31.4 | 44.6 | 26.4 | 34.0 | 29.9 | 51.6 | 40.2 | 30.1 | 19.6 | | 41.3 | 32.6 | 63.8 |
| 24. | scaff_41.75 | 47.1 | 58.4 | 39.7 | 48.0 | 47.7 | 61.1 | 50.5 | 47.8 | 21.2 | 48.4 | | 41.8 | 45.2 |
| 25. | scaff_40.379 | 58.8 | 44.6 | 39.7 | 47.0 | 50.5 | 47.4 | 72.7 | 45.1 | 19.6 | 39.8 | 50.5 | | 36.2 |
| 26. | scaff_XV.507 | 37.3 | 61.4 | 38.8 | 40.0 | 43.0 | 67.4 | 49.5 | 40.7 | 23.7 | 67.7 | 57.0 | 46.2 | |
| 27. | scaff_II.203 | 33.3 | 55.4 | 30.6 | 37.0 | 30.8 | 56.8 | 39.1 | 34.5 | 18.0 | 67.6 | 57.1 | 40.9 | 52.7 |
| 28. | scaff_II.2328 | 49.0 | 49.5 | 60.3 | 62.0 | 57.9 | 46.3 | 50.5 | 61.9 | 22.0 | 34.7 | 53.7 | 53.7 | 47.4 |
| 29. | scaff_XIX.758 | 37.3 | 51.5 | 40.5 | 46.0 | 43.9 | 56.8 | 43.7 | 40.7 | 23.7 | 52.9 | 58.2 | 50.0 | 55.9 |
| 30. | TA45751_4081 | 51.0 | 32.7 | 30.6 | 40.0 | 37.4 | 35.8 | 63.2 | 31.9 | 14.7 | 51.5 | 42.9 | 67.0 | 36.6 |
| 31. | TA48119_4081 | 35.6 | 45.9 | 37.0 | 32.2 | 31.5 | 44.5 | 33.6 | 37.0 | 32.2 | 41.8 | 37.7 | 31.5 | 52.7 |
| 32. | TA35962_4081 | 40.4 | 75.0 | 37.2 | 46.2 | 44.9 | 75.0 | 41.3 | 50.4 | 24.9 | 47.1 | 61.5 | 43.3 | 58.7 |
| 33. | BI208422 | 45.1 | 42.6 | 50.4 | 58.0 | 54.2 | 43.2 | 46.0 | 56.6 | 18.8 | 37.0 | 48.4 | 51.1 | 44.1 |
| 34. | BG128975 | 45.5 | 49.1 | 52.9 | 69.6 | 59.8 | 42.9 | 42.9 | 78.8 | 24.9 | 29.5 | 49.1 | 48.2 | 39.3 |
| 35. | TA52374_4081 | 49.1 | 62.5 | 38.0 | 44.6 | 52.7 | 59.8 | 39.3 | 52.2 | 25.7 | 42.0 | 54.5 | 42.9 | 52.7 |
| 36. | TA37180_4081 | 48.0 | 46.5 | 55.4 | 63.0 | 61.7 | 49.0 | 47.9 | 62.8 | 22.4 | 31.3 | 49.0 | 50.0 | 46.9 |
| 37. | BE353147 | 48.0 | 61.8 | 34.7 | 48.0 | 43.0 | 63.7 | 41.2 | 47.8 | 24.1 | 45.1 | 56.9 | 46.1 | 55.9 |
| 38. | TA56938_4081 | 54.8 | 52.9 | 51.2 | 62.5 | 84.1 | 47.1 | 47.1 | 66.4 | 24.9 | 32.7 | 48.1 | 50.0 | 43.3 |
| 39. | BG130916 | 38.2 | 38.6 | 46.3 | 60.0 | 47.7 | 38.9 | 47.1 | 54.0 | 18.4 | 44.4 | 45.1 | 44.3 | 38.7 |
| 40. | SEQ ID NO: 276 | 47.4 | 45.6 | 52.1 | 71.1 | 60.5 | 43.9 | 43.9 | 71.9 | 26.9 | 27.2 | 42.1 | 44.7 | 38.6 |
| 41. | TA41886_4081 | 51.5 | 61.2 | 38.8 | 44.7 | 41.1 | 64.1 | 39.8 | 46.9 | 26.1 | 45.6 | 58.3 | 43.7 | 59.2 |
| 42. | TA36295_4081 | 42.7 | 58.3 | 39.7 | 44.7 | 48.6 | 54.4 | 45.6 | 48.7 | 24.5 | 42.7 | 57.3 | 49.5 | 55.3 |
| 43. | TA56201_4081 | 50.0 | 45.5 | 38.8 | 48.0 | 51.4 | 43.2 | 53.2 | 49.6 | 18.8 | 29.8 | 46.8 | 51.1 | 38.3 |
| 44. | AJ785329 | 29.4 | 26.7 | 29.8 | 36.0 | 35.5 | 29.5 | 35.6 | 34.5 | 12.2 | 43.9 | 31.9 | 35.2 | 33.3 |
| 45. | CA725087 | 42.2 | 39.7 | 49.6 | 47.4 | 57.8 | 38.8 | 38.8 | 60.3 | 19.2 | 23.3 | 42.2 | 38.8 | 35.3 |
| 46. | TA69823_4565 | 27.9 | 26.9 | 27.4 | 25.9 | 26.9 | 23.4 | 25.9 | 28.9 | 26.5 | 15.9 | 24.4 | 28.9 | 24.4 |
| 47. | TA53297_4565 | 41.2 | 60.4 | 41.3 | 42.0 | 47.7 | 66.3 | 47.8 | 47.8 | 22.0 | 47.8 | 72.8 | 48.9 | 58.1 |
| 48. | TA101332_4565 | 46.6 | 49.5 | 45.5 | 57.3 | 57.0 | 55.3 | 46.6 | 56.6 | 24.5 | 35.0 | 52.4 | 52.4 | 47.6 |
| 49. | TA66036_4565 | 55.9 | 52.5 | 39.7 | 49.0 | 43.9 | 56.8 | 59.6 | 46.0 | 20.4 | 45.7 | 58.5 | 61.7 | 51.1 |
| 50. | TA100367_4565 | 43.9 | 47.4 | 47.1 | 55.3 | 60.5 | 43.9 | 40.4 | 62.3 | 22.4 | 26.3 | 43.0 | 42.1 | 36.0 |
| 51. | TA92393_4565 | 47.1 | 48.5 | 51.2 | 59.4 | 67.3 | 46.5 | 47.5 | 64.6 | 19.6 | 29.7 | 50.5 | 45.5 | 40.6 |
| 52. | BM136027 | 54.9 | 55.4 | 38.8 | 49.0 | 44.9 | 57.9 | 59.6 | 46.0 | 20.4 | 45.7 | 57.4 | 60.6 | 51.1 |
| 53. | CA705831 | 50.4 | 46.0 | 38.8 | 38.9 | 41.6 | 43.4 | 45.1 | 44.2 | 18.0 | 31.0 | 44.2 | 50.4 | 38.9 |
| 54. | CA593033 | 45.3 | 39.8 | 33.6 | 32.8 | 33.6 | 38.3 | 40.6 | 37.5 | 17.1 | 29.7 | 39.8 | 45.3 | 36.7 |
| 55. | CK153563 | 51.0 | 47.5 | 52.1 | 57.0 | 58.9 | 48.4 | 53.2 | 60.2 | 19.2 | 31.9 | 53.2 | 51.1 | 42.6 |
| 56. | TA66038_4565 | 56.9 | 49.5 | 38.8 | 45.0 | 45.8 | 52.0 | 57.1 | 46.9 | 18.8 | 41.8 | 56.1 | 64.3 | 50.0 |
| 57. | TA52915_4565 | 40.2 | 61.4 | 42.1 | 43.0 | 48.6 | 64.2 | 52.2 | 46.9 | 22.0 | 47.8 | 72.8 | 47.8 | 59.1 |
| 58. | TA69821_4565 | 53.3 | 43.0 | 38.0 | 42.1 | 45.8 | 43.0 | 46.7 | 43.4 | 22.4 | 29.0 | 46.7 | 53.3 | 39.3 |
| 59. | TA95153_4565 | 37.6 | 41.9 | 33.1 | 37.6 | 37.6 | 45.3 | 39.3 | 41.0 | 22.0 | 31.6 | 43.6 | 38.5 | 43.6 |
| 60. | CD899399 | 56.9 | 49.5 | 38.8 | 45.0 | 44.9 | 52.0 | 57.1 | 46.9 | 20.0 | 41.8 | 58.2 | 63.3 | 52.0 |
| 61. | TA77646_4565 | 50.0 | 49.5 | 52.1 | 58.0 | 66.4 | 48.5 | 48.5 | 64.6 | 20.0 | 30.3 | 53.5 | 48.5 | 44.4 |
| 62. | TA51752_4565 | 38.0 | 39.5 | 31.0 | 35.7 | 38.8 | 44.2 | 38.0 | 39.5 | 23.3 | 30.2 | 40.3 | 34.9 | 41.9 |
| 63. | Pop_GASA | 58.8 | 43.6 | 41.3 | 48.0 | 46.7 | 46.3 | 78.7 | 47.8 | 21.2 | 38.2 | 49.5 | 78.7 | 43.0 |
| 64. | Mt_GASA | 42.0 | 58.0 | 44.6 | 43.8 | 48.2 | 51.8 | 44.6 | 49.6 | 26.9 | 48.2 | 48.2 | 50.0 | 67.0 |
| 65. | At2g30810 | 48.1 | 50.9 | 51.2 | 59.4 | 61.7 | 48.1 | 44.3 | 61.1 | 26.1 | 31.1 | 48.1 | 43.4 | 41.5 |
| 66. | At3g02885 | 48.0 | 45.5 | 56.2 | 62.0 | 66.4 | 45.4 | 51.5 | 61.9 | 21.6 | 35.1 | 52.6 | 56.7 | 50.5 |
| 67. | At5g15230 | 46.2 | 43.4 | 46.3 | 53.8 | 80.4 | 39.6 | 45.3 | 61.1 | 23.3 | 31.1 | 42.5 | 47.2 | 42.5 |
| 68. | At1g74670 | 50.0 | 52.5 | 48.8 | 65.3 | 74.8 | 50.5 | 44.6 | 63.7 | 23.3 | 35.6 | 46.5 | 48.5 | 47.5 |
| | | 27 | 28 | 29 | 30 | 31 | 32 | 33 | 34 | 35 | 36 | 37 | 38 | 39 |
| 1. | TA5035_4679 | 35.9 | 48.4 | 34.5 | 41.0 | 21.2 | 30.8 | 56.8 | 44.6 | 29.5 | 49.0 | 32.4 | 58.7 | 56.4 |
| 2. | TA5923_4679 | 23.5 | 47.9 | 31.9 | 26.9 | 28.1 | 35.5 | 43.7 | 54.6 | 31.9 | 46.3 | 32.8 | 47.9 | 42.0 |
| 3. | Os05g0376800 | 19.1 | 34.9 | 22.4 | 21.1 | 24.1 | 25.7 | 33.6 | 42.1 | 27.0 | 36.8 | 27.6 | 39.5 | 34.9 |
| 4. | Os04g0465300 | 33.3 | 38.1 | 32.4 | 25.7 | 33.1 | 41.0 | 32.4 | 36.0 | 39.8 | 36.8 | 45.5 | 35.8 | 29.5 |
| 5. | Os10g0115550 | 24.8 | 42.1 | 29.1 | 29.1 | 27.7 | 31.1 | 40.2 | 39.1 | 31.0 | 39.3 | 28.2 | 35.0 | 32.5 |
| 6. | AK105729 | 32.5 | 33.3 | 29.1 | 38.5 | 28.2 | 37.6 | 28.2 | 30.8 | 36.8 | 30.5 | 35.9 | 35.0 | 29.1 |
| 7. | Os05g0432200 | 45.7 | 42.1 | 41.3 | 34.8 | 30.8 | 47.6 | 33.7 | 35.7 | 46.4 | 40.6 | 44.7 | 38.5 | 33.7 |
| 8. | Os09g0414900 | 22.2 | 43.6 | 28.2 | 29.1 | 28.4 | 32.5 | 41.0 | 48.3 | 33.3 | 43.6 | 29.1 | 51.3 | 40.2 |
| 9. | Os03g0607200 | 33.0 | 31.6 | 33.7 | 36.2 | 24.8 | 37.4 | 30.9 | 27.0 | 32.2 | 27.3 | 34.3 | 29.0 | 26.6 |
| 10. | Os07g0592000 | 27.2 | 35.0 | 28.8 | 34.0 | 21.6 | 30.2 | 29.1 | 28.9 | 31.6 | 31.7 | 28.8 | 33.6 | 27.5 |
| 11. | AK110640 | 44.6 | 42.1 | 40.2 | 34.8 | 30.1 | 46.7 | 33.7 | 35.7 | 45.5 | 40.6 | 43.7 | 38.5 | 33.7 |
| 12. | Os06g0266800 | 34.5 | 53.7 | 37.9 | 39.3 | 21.9 | 28.8 | 56.0 | 46.4 | 33.9 | 50.0 | 28.4 | 51.0 | 56.5 |
| 13. | Os03g0760800 | 38.7 | 40.8 | 33.3 | 48.4 | 28.2 | 40.2 | 35.5 | 33.0 | 40.0 | 36.4 | 35.2 | 35.5 | 37.6 |
| 14. | scaff_205.30 | 30.4 | 37.3 | 29.4 | 47.1 | 27.4 | 33.7 | 32.4 | 33.9 | 38.3 | 34.0 | 34.9 | 39.0 | 31.4 |
| 15. | scaff_II.204 | 48.5 | 42.6 | 40.6 | 29.7 | 34.2 | 64.4 | 32.7 | 36.6 | 50.9 | 36.6 | 52.9 | 38.1 | 29.7 |
| 16. | scaff_II.2330 | 25.6 | 53.7 | 28.9 | 24.8 | 25.9 | 31.4 | 43.9 | 43.0 | 32.2 | 45.5 | 27.3 | 40.5 | 40.5 |
| 17. | scaff_VI.397 | 27.0 | 55.0 | 33.0 | 32.0 | 22.6 | 30.8 | 53.0 | 59.8 | 33.0 | 57.0 | 34.0 | 54.8 | 54.0 |
| 18. | scf_XVII.377 | 25.2 | 47.7 | 33.6 | 29.9 | 24.7 | 31.8 | 45.8 | 51.8 | 36.8 | 52.3 | 31.8 | 77.6 | 47.7 |
| 19. | scaff_II.202 | 50.5 | 37.9 | 41.1 | 32.6 | 36.3 | 62.5 | 34.7 | 36.6 | 50.0 | 36.5 | 51.0 | 39.4 | 31.6 |
| 20. | scaff_I.2410 | 32.2 | 38.9 | 35.6 | 58.6 | 24.5 | 33.3 | 34.5 | 31.3 | 28.6 | 36.5 | 29.4 | 31.7 | 33.3 |
| 21. | scaff_I.1483 | 25.7 | 51.3 | 29.2 | 27.4 | 25.3 | 36.3 | 48.7 | 65.2 | 37.0 | 52.6 | 33.9 | 54.9 | 47.8 |
| 22. | scaff_I.1926 | 16.3 | 16.3 | 18.0 | 12.2 | 27.3 | 19.5 | 14.3 | 17.6 | 20.4 | 14.9 | 19.9 | 15.9 | 13.9 |
| 23. | scaff_XII.704 | 60.9 | 30.2 | 45.5 | 43.9 | 39.7 | 43.8 | 32.9 | 24.8 | 35.4 | 27.8 | 40.8 | 27.6 | 35.6 |
| 24. | scaff_41.75 | 44.0 | 43.2 | 42.9 | 35.2 | 29.5 | 47.1 | 37.4 | 34.5 | 45.5 | 36.5 | 42.2 | 35.6 | 38.5 |
| 25. | scaff_40.379 | 34.1 | 38.9 | 34.1 | 63.6 | 24.7 | 31.7 | 40.9 | 35.7 | 34.2 | 39.6 | 32.4 | 39.0 | 37.5 |
| 26. | scaff_XV.507 | 47.3 | 36.1 | 45.2 | 32.3 | 47.3 | 48.6 | 36.6 | 31.9 | 43.4 | 36.4 | 43.7 | 32.4 | 30.1 |
| 27. | scaff_II.203 | | 36.8 | 48.3 | 41.2 | 28.8 | 49.0 | 38.3 | 26.8 | 38.4 | 32.3 | 43.1 | 27.9 | 38.9 |
| 28. | scaff_II.2328 | 42.1 | | 36.5 | 32.6 | 26.7 | 37.5 | 66.3 | 50.9 | 37.7 | 69.1 | 35.9 | 55.8 | 49.5 |
| 29. | scaff_XIX.758 | 55.2 | 45.3 | | 31.0 | 29.5 | 48.1 | 41.4 | 31.3 | 34.8 | 37.8 | 38.2 | 36.5 | 34.5 |
| 30. | TA45751_4081 | 47.1 | 40.0 | 40.2 | | 20.5 | 27.9 | 37.0 | 29.5 | 31.3 | 32.3 | 27.5 | 30.8 | 40.3 |
| 31. | TA48119_4081 | 31.5 | 33.6 | 40.4 | 26.7 | | 33.6 | 22.6 | 27.4 | 37.7 | 25.0 | 36.7 | 26.0 | 20.5 |
| 32. | TA35962_4081 | 55.8 | 47.1 | 54.8 | 29.8 | 45.9 | | 29.8 | 33.3 | 50.0 | 36.5 | 50.0 | 32.7 | 26.9 |
| 33. | BI208422 | 46.9 | 75.8 | 52.9 | 43.2 | 28.1 | 41.3 | | 52.7 | 33.9 | 84.4 | 35.3 | 49.0 | 61.7 |
| 34. | BG128975 | 33.9 | 65.2 | 41.1 | 34.8 | 39.7 | 47.3 | 59.8 | | 33.6 | 53.1 | 35.7 | 58.0 | 48.2 |
| 35. | TA52374_4081 | 50.0 | 48.2 | 46.4 | 34.8 | 47.3 | 64.3 | 40.2 | 44.6 | | 33.9 | 40.2 | 39.8 | 28.3 |
| 36. | TA37180_4081 | 39.6 | 82.3 | 50.0 | 38.5 | 32.9 | 47.1 | 84.4 | 65.2 | 44.6 | | 39.0 | 53.8 | 51.0 |
| 37. | BE353147 | 48.0 | 53.9 | 52.0 | 33.3 | 43.8 | 62.5 | 45.1 | 48.2 | 54.5 | 50.0 | | 37.7 | 29.4 |
| 38. | TA56938_4081 | 34.6 | 65.4 | 48.1 | 37.5 | 31.5 | 41.3 | 56.7 | 65.2 | 51.8 | 61.5 | 49.0 | | 50.0 |
| 39. | BG130916 | 51.4 | 55.8 | 47.1 | 50.0 | 24.7 | 35.6 | 64.2 | 54.5 | 34.8 | 54.2 | 39.2 | 51.9 | |
| 40. | SEQ ID NO: 276 | 30.7 | 57.9 | 38.6 | 34.2 | 34.9 | 43.0 | 53.5 | 70.2 | 43.0 | 59.6 | 43.9 | 65.8 | 53.5 |
| 41. | TA41886_4081 | 49.5 | 50.5 | 48.5 | 34.0 | 43.2 | 63.5 | 42.7 | 40.2 | 54.5 | 50.5 | 82.5 | 42.3 | 38.8 |
| 42. | TA36295_4081 | 46.6 | 49.5 | 68.0 | 35.0 | 41.1 | 65.4 | 48.5 | 53.6 | 55.4 | 48.5 | 57.3 | 55.8 | 43.7 |
| 43. | TA56201_4081 | 31.9 | 55.8 | 38.3 | 41.5 | 28.1 | 38.5 | 52.1 | 44.6 | 42.9 | 54.2 | 45.1 | 51.9 | 47.9 |
| 44. | AJ785329 | 38.2 | 41.1 | 34.5 | 44.6 | 19.2 | 27.9 | 45.7 | 33.9 | 26.8 | 37.5 | 23.5 | 36.5 | 51.4 |
| 45. | CA725087 | 30.2 | 54.3 | 33.6 | 29.3 | 28.8 | 41.4 | 50.0 | 55.2 | 44.0 | 54.3 | 38.8 | 56.0 | 41.4 |
| 46. | TA69823_4565 | 17.4 | 27.9 | 22.9 | 22.4 | 34.3 | 23.9 | 20.9 | 27.9 | 25.9 | 24.9 | 23.9 | 26.9 | 21.4 |
| 47. | TA53297_4565 | 52.2 | 52.6 | 57.6 | 39.1 | 38.4 | 60.6 | 43.5 | 45.5 | 55.4 | 51.0 | 62.7 | 46.2 | 40.2 |
| 48. | TA101332_4565 | 36.9 | 61.2 | 46.6 | 39.8 | 36.3 | 51.9 | 54.4 | 56.3 | 49.1 | 60.2 | 53.4 | 56.7 | 48.5 |
| 49. | TA66036_4565 | 46.8 | 52.6 | 42.6 | 52.1 | 37.0 | 50.0 | 44.7 | 46.4 | 50.0 | 51.0 | 53.9 | 50.0 | 41.5 |
| 50. | TA100367_4565 | 32.5 | 53.5 | 36.8 | 34.2 | 32.9 | 36.8 | 48.2 | 57.9 | 43.0 | 51.8 | 43.0 | 55.3 | 46.5 |
| 51. | TA92393_4565 | 36.6 | 63.4 | 40.6 | 36.6 | 29.5 | 46.2 | 58.4 | 58.0 | 48.2 | 62.4 | 45.1 | 69.2 | 51.5 |
| 52. | BM136027 | 44.7 | 52.6 | 42.6 | 51.1 | 37.0 | 51.0 | 44.7 | 46.4 | 49.1 | 50.0 | 52.0 | 52.9 | 41.5 |
| 53. | CA705831 | 33.6 | 45.1 | 32.7 | 42.5 | 30.1 | 41.6 | 38.1 | 46.0 | 46.0 | 41.6 | 42.5 | 49.6 | 36.3 |
| 54. | CA593033 | 29.7 | 36.7 | 28.1 | 38.3 | 32.2 | 39.1 | 28.9 | 39.1 | 41.4 | 32.0 | 38.3 | 40.6 | 30.5 |
| 55. | CK153563 | 40.4 | 67.4 | 47.9 | 39.4 | 28.8 | 44.2 | 62.8 | 58.0 | 45.5 | 66.7 | 44.1 | 64.4 | 53.2 |
| 56. | TA66038_4565 | 41.8 | 49.0 | 42.9 | 51.0 | 37.0 | 51.0 | 42.9 | 41.1 | 50.0 | 45.9 | 47.1 | 49.0 | 43.9 |
| 57. | TA52915_4565 | 52.2 | 52.6 | 54.3 | 39.1 | 39.0 | 61.5 | 43.5 | 46.4 | 56.3 | 50.0 | 61.8 | 47.1 | 40.2 |
| 58. | TA69821_4565 | 30.8 | 45.8 | 36.4 | 41.1 | 34.9 | 40.2 | 40.2 | 43.8 | 45.5 | 45.8 | 44.9 | 50.5 | 34.6 |
| 59. | TA95153_4565 | 31.6 | 37.6 | 38.5 | 28.2 | 36.3 | 47.9 | 34.2 | 40.2 | 47.9 | 36.8 | 44.4 | 39.3 | 31.6 |
| 60. | CD899399 | 42.9 | 49.0 | 43.9 | 51.0 | 37.0 | 51.9 | 42.9 | 41.1 | 50.9 | 46.9 | 47.1 | 49.0 | 42.9 |
| 61. | TA77646_4565 | 38.4 | 66.7 | 42.4 | 37.4 | 30.1 | 48.1 | 61.6 | 59.8 | 49.1 | 66.7 | 47.1 | 67.3 | 51.5 |
| 62. | TA51752_4565 | 29.5 | 34.9 | 35.7 | 27.1 | 38.4 | 45.7 | 30.2 | 36.4 | 51.2 | 34.1 | 41.1 | 39.5 | 28.7 |
| 63. | Pop_GASA | 37.1 | 52.6 | 50.6 | 61.8 | 32.2 | 41.3 | 51.7 | 42.9 | 42.9 | 50.0 | 47.1 | 49.0 | 48.3 |
| 64. | Mt_GASA | 41.1 | 45.5 | 51.8 | 34.8 | 56.2 | 51.8 | 42.0 | 50.9 | 57.1 | 44.6 | 48.2 | 49.1 | 36.6 |
| 65. | At2g30810 | 38.7 | 60.4 | 43.4 | 35.8 | 37.7 | 48.1 | 56.6 | 65.2 | 51.8 | 59.4 | 54.7 | 66.0 | 53.8 |
| 66. | At3g02885 | 38.1 | 79.4 | 46.4 | 43.3 | 36.3 | 46.2 | 69.1 | 66.1 | 44.6 | 75.3 | 46.1 | 66.3 | 55.7 |
| 67. | At5g15230 | 34.0 | 59.4 | 43.4 | 34.9 | 33.6 | 46.2 | 49.1 | 57.1 | 46.4 | 55.7 | 42.5 | 76.4 | 46.2 |
| 68. | At1g74670 | 36.6 | 65.3 | 48.5 | 37.6 | 32.9 | 47.1 | 59.4 | 64.3 | 51.8 | 65.3 | 44.1 | 77.9 | 52.5 |
| | | 40 | 41 | 42 | 43 | 44 | 45 | 46 | 47 | 48 | 49 | 50 | 51 | 52 |
| 1. | TA5035_4679 | 46.5 | 31.1 | 36.9 | 40.4 | 44.3 | 41.4 | 18.8 | 34.8 | 42.7 | 36.2 | 45.6 | 50.5 | 38.3 |
| 2. | TA5923_4679 | 57.9 | 37.0 | 36.1 | 33.3 | 25.8 | 37.5 | 23.3 | 31.7 | 43.3 | 32.8 | 42.9 | 45.4 | 33.6 |
| 3. | Os05g0376800 | 44.7 | 25.0 | 26.3 | 27.5 | 19.6 | 27.2 | 22.7 | 27.0 | 30.9 | 27.7 | 33.6 | 32.9 | 27.7 |
| 4. | Os04g0465300 | 37.4 | 41.8 | 39.3 | 35.2 | 22.9 | 27.0 | 17.2 | 38.1 | 35.5 | 34.5 | 29.3 | 33.3 | 34.5 |
| 5. | Os10g0115550 | 35.4 | 26.9 | 35.5 | 30.5 | 25.4 | 42.1 | 20.0 | 32.5 | 56.4 | 29.9 | 36.2 | 45.3 | 29.9 |
| 6. | AK105729 | 33.9 | 36.8 | 32.5 | 35.6 | 22.0 | 24.8 | 27.5 | 37.6 | 35.6 | 69.2 | 33.1 | 30.6 | 68.4 |
| 7. | Os05g0432200 | 36.8 | 48.5 | 43.7 | 34.0 | 28.0 | 28.4 | 17.8 | 70.7 | 39.8 | 42.1 | 31.6 | 37.6 | 41.1 |
| 8. | Os09g0414900 | 47.9 | 28.1 | 31.6 | 38.1 | 30.5 | 41.0 | 21.3 | 28.2 | 43.6 | 30.8 | 47.0 | 50.4 | 31.7 |
| 9. | Os03g0607200 | 29.9 | 31.1 | 34.9 | 35.1 | 23.2 | 27.1 | 21.4 | 35.8 | 32.1 | 51.6 | 28.2 | 31.5 | 50.5 |
| 10. | Os07g0592000 | 31.0 | 31.8 | 30.5 | 36.5 | 21.4 | 28.1 | 36.6 | 31.1 | 36.2 | 41.9 | 33.6 | 33.6 | 41.9 |
| 11. | AK110640 | 36.8 | 48.5 | 42.7 | 34.0 | 28.0 | 28.4 | 17.8 | 69.6 | 38.8 | 42.1 | 31.6 | 37.6 | 41.1 |
| 12. | Os06g0266800 | 45.6 | 32.0 | 35.0 | 38.3 | 41.2 | 50.9 | 17.3 | 37.6 | 41.9 | 38.3 | 59.6 | 70.3 | 37.1 |
| 13. | Os03g0760800 | 34.2 | 38.7 | 37.7 | 40.8 | 27.7 | 30.0 | 24.0 | 44.2 | 40.6 | 85.1 | 32.5 | 36.5 | 84.0 |
| 14. | scaff_205.30 | 35.1 | 40.2 | 32.0 | 35.9 | 22.3 | 32.5 | 21.8 | 31.4 | 35.0 | 46.3 | 36.0 | 38.8 | 45.4 |
| 15. | scaff_II.204 | 36.0 | 53.4 | 47.1 | 32.4 | 22.5 | 28.3 | 18.3 | 51.5 | 35.9 | 41.3 | 32.5 | 37.1 | 44.2 |
| 16. | scaff_II.2330 | 42.1 | 31.4 | 33.1 | 30.3 | 27.0 | 32.6 | 19.8 | 29.8 | 37.2 | 31.5 | 38.2 | 42.1 | 31.5 |
| 17. | scaff_VI.397 | 61.2 | 32.7 | 35.9 | 38.6 | 32.7 | 36.8 | 21.3 | 31.0 | 43.7 | 37.9 | 45.6 | 47.5 | 37.9 |
| 18. | scf_XVII.377 | 51.8 | 32.7 | 38.3 | 37.3 | 31.5 | 41.1 | 20.8 | 35.5 | 42.6 | 31.8 | 49.1 | 53.3 | 32.7 |
| 19. | scaff_II.202 | 36.0 | 56.3 | 44.7 | 33.3 | 27.1 | 29.3 | 17.3 | 55.7 | 40.0 | 44.9 | 32.5 | 39.6 | 45.9 |
| 20. | scaff_I.2410 | 29.8 | 29.1 | 34.0 | 38.3 | 28.4 | 28.4 | 19.3 | 34.8 | 34.0 | 48.9 | 28.1 | 35.6 | 48.9 |
| 21. | scaff_I.1483 | 60.5 | 35.1 | 33.6 | 37.7 | 29.8 | 43.1 | 21.3 | 34.5 | 42.5 | 37.9 | 46.5 | 53.1 | 37.9 |
| 22. | scaff_I.1926 | 18.8 | 21.1 | 18.8 | 14.7 | 9.4 | 14.5 | 17.8 | 18.8 | 19.2 | 16.1 | 16.3 | 16.3 | 16.1 |
| 23. | scaff_XII.704 | 21.7 | 39.4 | 37.5 | 25.5 | 34.8 | 19.8 | 12.8 | 44.1 | 29.8 | 36.8 | 21.7 | 26.5 | 36.8 |
| 24. | scaff_41.75 | 32.5 | 45.6 | 43.3 | 38.5 | 29.3 | 31.4 | 18.8 | 56.5 | 40.8 | 47.9 | 34.2 | 40.8 | 46.8 |
| 25. | scaff_40.379 | 32.5 | 33.0 | 37.9 | 41.5 | 31.5 | 31.0 | 21.3 | 40.2 | 42.7 | 56.4 | 34.2 | 39.6 | 55.3 |
| 26. | scaff_XV.507 | 27.0 | 44.2 | 46.2 | 29.8 | 23.7 | 27.6 | 17.7 | 48.4 | 35.6 | 37.8 | 27.8 | 32.4 | 37.8 |
| 27. | scaff_II.203 | 25.4 | 42.7 | 40.8 | 28.7 | 33.3 | 21.6 | 14.4 | 50.0 | 31.1 | 38.3 | 24.6 | 29.7 | 37.2 |
| 28. | scaff_II.2328 | 47.4 | 41.7 | 39.4 | 41.4 | 35.4 | 43.3 | 20.8 | 38.9 | 48.5 | 40.8 | 43.5 | 52.9 | 40.8 |
| 29. | scaff_XIX.758 | 27.2 | 39.8 | 58.3 | 32.6 | 29.5 | 26.7 | 13.4 | 42.4 | 38.5 | 34.0 | 26.3 | 32.7 | 34.0 |
| 30. | TA45751_4081 | 27.2 | 29.1 | 30.1 | 35.1 | 39.4 | 26.7 | 18.3 | 32.6 | 35.0 | 50.0 | 28.9 | 34.7 | 48.9 |
| 31. | TA48119_4081 | 23.3 | 36.1 | 32.2 | 21.2 | 15.1 | 21.0 | 22.7 | 31.5 | 30.6 | 28.9 | 24.0 | 24.7 | 28.9 |
| 32. | TA35962_4081 | 31.6 | 50.0 | 50.5 | 28.6 | 24.8 | 28.9 | 16.7 | 48.1 | 38.1 | 38.3 | 29.8 | 35.2 | 39.3 |
| 33. | BI208422 | 48.2 | 34.0 | 40.8 | 42.6 | 40.2 | 38.8 | 14.9 | 33.7 | 47.6 | 35.8 | 39.5 | 47.5 | 35.8 |
| 34. | BG128975 | 63.2 | 30.4 | 40.0 | 33.6 | 28.3 | 39.5 | 21.3 | 35.7 | 42.9 | 34.5 | 46.5 | 49.1 | 35.3 |
| 35. | TA52374_4081 | 30.7 | 38.4 | 42.1 | 33.6 | 23.9 | 34.1 | 17.3 | 43.8 | 38.4 | 39.1 | 33.6 | 42.9 | 38.3 |
| 36. | TA37180_4081 | 50.0 | 38.1 | 40.8 | 39.4 | 34.0 | 38.8 | 16.3 | 37.5 | 48.5 | 37.4 | 39.7 | 47.5 | 36.4 |
| 37. | BE353147 | 33.9 | 72.8 | 44.3 | 33.7 | 21.4 | 26.7 | 18.3 | 47.6 | 40.0 | 37.1 | 33.0 | 32.4 | 36.2 |
| 38. | TA56938_4081 | 58.8 | 37.1 | 44.3 | 35.5 | 31.4 | 43.8 | 22.3 | 35.6 | 41.3 | 34.6 | 49.1 | 59.0 | 38.0 |
| 39. | BG130916 | 47.4 | 31.1 | 34.0 | 36.2 | 43.8 | 33.3 | 16.4 | 33.7 | 38.8 | 35.1 | 38.6 | 46.1 | 35.1 |
| 40. | SEQ ID NO: 276 | | 35.3 | 36.8 | 38.8 | 27.8 | 38.2 | 22.3 | 34.2 | 41.7 | 32.5 | 44.7 | 47.4 | 32.5 |
| 41. | TA41886_4081 | 43.9 | | 42.9 | 34.3 | 24.0 | 31.7 | 18.3 | 47.6 | 38.5 | 37.7 | 33.9 | 40.4 | 37.7 |
| 42. | TA36295_4081 | 48.2 | 55.3 | | 33.7 | 26.0 | 31.7 | 16.3 | 43.0 | 40.0 | 37.4 | 36.0 | 37.9 | 36.4 |
| 43. | TA56201_4081 | 48.2 | 42.7 | 49.5 | | 45.7 | 33.3 | 22.1 | 34.0 | 45.7 | 38.4 | 34.2 | 37.3 | 38.8 |
| 44. | AJ785329 | 35.1 | 25.2 | 29.1 | 50.0 | | 27.4 | 12.4 | 24.7 | 33.7 | 26.3 | 28.7 | 35.3 | 26.3 |
| 45. | CA725087 | 53.4 | 43.1 | 42.2 | 44.0 | 31.0 | | 16.1 | 29.7 | 39.2 | 28.0 | 54.2 | 73.7 | 28.8 |
| 46. | TA69823_4565 | 30.3 | 24.9 | 25.4 | 26.4 | 15.9 | 22.4 | | 18.8 | 21.8 | 21.6 | 19.3 | 17.8 | 21.1 |
| 47. | TA53297_4565 | 43.9 | 61.2 | 56.3 | 44.7 | 27.2 | 39.7 | 21.4 | | 40.8 | 44.2 | 29.8 | 39.8 | 43.2 |
| 48. | TA101332_4565 | 56.1 | 48.5 | 49.5 | 55.3 | 37.9 | 48.3 | 28.4 | 54.4 | | 39.6 | 38.6 | 48.5 | 39.6 |
| 49. | TA66036_4565 | 43.9 | 52.4 | 52.4 | 48.9 | 28.7 | 33.6 | 26.4 | 57.4 | 47.6 | | 34.2 | 34.6 | 98.9 |
| 50. | TA100367_4565 | 57.9 | 45.6 | 45.6 | 46.5 | 35.1 | 67.2 | 25.4 | 41.2 | 49.1 | 43.0 | | 68.4 | 35.0 |
| 51. | TA92393_4565 | 60.5 | 49.5 | 48.5 | 49.5 | 39.6 | 76.7 | 23.4 | 49.5 | 58.3 | 39.6 | 74.6 | | 35.6 |
| 52. | BM136027 | 43.9 | 51.5 | 51.5 | 53.2 | 28.7 | 34.5 | 25.9 | 56.4 | 47.6 | 98.9 | 42.1 | 40.6 | |
| 53. | CA705831 | 43.0 | 44.2 | 41.6 | 36.3 | 20.4 | 42.2 | 27.4 | 43.4 | 43.4 | 69.0 | 43.9 | 40.7 | 68.1 |
| 54. | CA593033 | 37.5 | 39.8 | 37.5 | 33.6 | 21.1 | 37.5 | 28.4 | 38.3 | 38.3 | 61.7 | 39.1 | 32.8 | 60.9 |
| 55. | CK153563 | 56.1 | 49.5 | 46.6 | 56.4 | 41.5 | 70.7 | 24.4 | 53.2 | 56.3 | 42.6 | 63.2 | 85.1 | 42.6 |
| 56. | TA66038_4565 | 46.5 | 48.5 | 48.5 | 49.0 | 28.6 | 35.3 | 28.9 | 51.0 | 51.5 | 82.7 | 44.7 | 47.5 | 81.6 |
| 57. | TA52915_4565 | 44.7 | 60.2 | 57.3 | 45.7 | 27.2 | 39.7 | 21.4 | 98.9 | 54.4 | 56.4 | 41.2 | 49.5 | 55.3 |
| 58. | TA69821_4565 | 45.6 | 39.3 | 44.9 | 48.6 | 29.0 | 38.8 | 48.3 | 39.3 | 58.9 | 52.3 | 44.7 | 43.9 | 51.4 |
| 59. | TA95153_4565 | 44.4 | 44.4 | 43.6 | 37.6 | 23.1 | 35.0 | 25.4 | 47.9 | 41.9 | 41.0 | 35.9 | 38.5 | 40.2 |
| 60. | CD899399 | 45.6 | 48.5 | 49.5 | 49.0 | 27.6 | 37.1 | 27.4 | 52.0 | 51.5 | 87.8 | 43.9 | 44.6 | 86.7 |
| 61. | TA77646_4565 | 57.0 | 51.5 | 50.5 | 52.5 | 40.4 | 80.2 | 24.4 | 51.5 | 59.2 | 41.4 | 71.9 | 94.1 | 42.4 |
| 62. | TA51752_4565 | 41.9 | 40.3 | 40.3 | 38.0 | 20.2 | 31.8 | 28.9 | 44.2 | 41.1 | 38.8 | 34.9 | 34.9 | 36.4 |
| 63. | Pop_GASA | 45.6 | 44.7 | 48.5 | 53.2 | 36.0 | 42.2 | 27.9 | 43.5 | 48.5 | 58.5 | 43.0 | 50.5 | 58.5 |
| 64. | Mt_GASA | 48.2 | 49.1 | 54.5 | 41.1 | 28.6 | 43.1 | 26.4 | 49.1 | 47.3 | 46.4 | 41.2 | 44.6 | 46.4 |
| 65. | At2g30810 | 61.4 | 48.1 | 49.1 | 55.7 | 35.8 | 50.0 | 27.9 | 47.2 | 66.0 | 44.3 | 57.9 | 60.4 | 47.2 |
| 66. | At3g02885 | 55.3 | 46.6 | 48.5 | 52.6 | 36.1 | 54.3 | 24.9 | 51.5 | 66.0 | 51.5 | 55.3 | 65.3 | 52.6 |
| 67. | At5g15230 | 56.1 | 43.4 | 52.8 | 51.9 | 37.7 | 55.2 | 26.9 | 43.4 | 57.5 | 43.4 | 56.1 | 64.2 | 44.3 |
| 68. | At1g74670 | 63.2 | 43.7 | 53.4 | 51.5 | 37.6 | 56.0 | 24.4 | 47.5 | 57.3 | 48.5 | 54.4 | 64.4 | 48.5 |
| | | 53 | 54 | 55 | 56 | 57 | 58 | 59 | 60 | 61 | 62 | 63 | 64 | 65 |
| 1. | TA5035_4679 | 30.1 | 25.8 | 51.1 | 36.7 | 34.8 | 30.6 | 23.9 | 35.7 | 52.5 | 21.7 | 34.8 | 26.8 | 48.6 |
| 2. | TA5923_4679 | 29.1 | 26.3 | 45.4 | 35.2 | 30.3 | 30.6 | 29.3 | 34.4 | 47.1 | 29.5 | 32.8 | 32.5 | 47.9 |
| 3. | Os05g0376800 | 20.7 | 19.6 | 32.2 | 27.1 | 26.3 | 28.6 | 24.0 | 25.8 | 33.6 | 27.9 | 23.7 | 27.5 | 35.5 |
| 4. | Os04g0465300 | 27.6 | 24.6 | 33.3 | 31.5 | 40.0 | 31.2 | 32.5 | 33.3 | 33.3 | 27.9 | 32.4 | 38.1 | 36.7 |
| 5. | Os10g0115550 | 32.5 | 27.7 | 43.6 | 29.9 | 32.5 | 32.2 | 25.0 | 29.1 | 46.2 | 22.0 | 33.1 | 31.3 | 43.9 |
| 6. | AK105729 | 51.5 | 47.0 | 30.8 | 64.4 | 36.8 | 36.1 | 30.8 | 68.6 | 30.6 | 33.6 | 43.6 | 31.4 | 31.6 |
| 7. | Os05g0432200 | 30.7 | 27.9 | 38.3 | 44.9 | 70.7 | 33.3 | 37.3 | 42.9 | 38.4 | 34.9 | 36.6 | 38.6 | 34.9 |
| 8. | Os09g0414900 | 25.9 | 23.4 | 46.2 | 32.5 | 29.1 | 32.8 | 24.4 | 31.7 | 51.3 | 29.2 | 30.8 | 28.9 | 50.0 |
| 9. | Os03g0607200 | 40.4 | 37.2 | 31.7 | 51.5 | 34.7 | 36.6 | 31.1 | 51.5 | 32.4 | 29.0 | 40.4 | 33.0 | 27.5 |
| 10. | Os07g0592000 | 32.3 | 31.2 | 32.0 | 40.2 | 31.1 | 70.0 | 27.7 | 41.1 | 34.3 | 26.9 | 39.8 | 28.4 | 32.4 |
| 11. | AK110640 | 30.7 | 27.9 | 38.3 | 44.9 | 69.6 | 33.3 | 36.4 | 42.9 | 38.4 | 34.1 | 36.6 | 37.7 | 34.9 |
| 12. | Os06g0266800 | 31.0 | 24.4 | 64.9 | 36.7 | 37.6 | 29.6 | 29.1 | 34.7 | 67.7 | 24.0 | 37.1 | 28.6 | 46.2 |
| 13. | Os03g0760800 | 63.7 | 57.0 | 39.2 | 78.6 | 45.3 | 41.4 | 32.8 | 82.7 | 37.5 | 29.8 | 54.8 | 34.8 | 34.9 |
| 14. | scaff_205.30 | 39.4 | 36.6 | 37.9 | 42.9 | 30.4 | 39.8 | 29.1 | 44.6 | 40.8 | 29.0 | 55.3 | 31.9 | 33.9 |
| 15. | scaff_II.204 | 34.1 | 29.7 | 37.6 | 37.5 | 50.0 | 32.4 | 32.5 | 39.4 | 37.9 | 29.5 | 33.7 | 43.4 | 37.0 |
| 16. | scaff_II.2330 | 27.3 | 22.8 | 41.5 | 31.5 | 29.8 | 30.9 | 25.2 | 31.5 | 41.5 | 22.5 | 29.8 | 34.7 | 43.0 |
| 17. | scaff_VI.397 | 25.4 | 22.6 | 47.0 | 34.0 | 32.0 | 32.4 | 27.4 | 33.0 | 48.0 | 26.4 | 32.0 | 31.3 | 46.2 |
| 18. | scf_XVII.377 | 30.2 | 24.3 | 49.5 | 35.5 | 36.4 | 35.5 | 24.8 | 34.5 | 53.3 | 25.6 | 32.7 | 31.6 | 49.5 |
| 19. | scaff_II.202 | 34.2 | 28.8 | 39.6 | 38.8 | 54.7 | 33.3 | 33.3 | 40.8 | 39.4 | 32.6 | 34.7 | 40.2 | 36.1 |
| 20. | scaff_I.2410 | 38.1 | 35.2 | 40.0 | 50.0 | 36.6 | 32.4 | 29.7 | 50.0 | 36.4 | 26.9 | 69.2 | 31.9 | 31.2 |
| 21. | scaff_I.1483 | 28.1 | 25.3 | 51.3 | 35.3 | 33.6 | 32.2 | 28.6 | 35.3 | 54.0 | 30.2 | 34.5 | 35.3 | 49.6 |
| 22. | scaff_I.1926 | 11.6 | 8.6 | 15.9 | 14.5 | 19.2 | 17.4 | 16.7 | 15.3 | 16.3 | 17.5 | 15.9 | 22.4 | 17.1 |
| 23. | scaff_XII.704 | 24.6 | 22.5 | 28.4 | 33.3 | 44.1 | 22.9 | 25.4 | 33.3 | 27.0 | 23.8 | 30.0 | 42.9 | 25.2 |
| 24. | scaff_41.75 | 35.4 | 30.5 | 43.2 | 46.9 | 56.5 | 34.5 | 32.5 | 48.0 | 42.6 | 30.2 | 36.3 | 37.5 | 36.8 |
| 25. | scaff_40.379 | 44.2 | 40.6 | 43.6 | 57.6 | 39.1 | 40.7 | 27.4 | 54.1 | 40.4 | 25.6 | 71.9 | 36.6 | 34.0 |
| 26. | scaff_XV.507 | 28.2 | 25.8 | 34.7 | 36.4 | 48.4 | 27.5 | 32.2 | 38.2 | 36.0 | 30.0 | 30.1 | 56.3 | 30.8 |
| 27. | scaff_II.203 | 27.4 | 22.7 | 34.0 | 34.7 | 50.0 | 25.0 | 25.6 | 35.7 | 30.3 | 22.5 | 31.5 | 34.8 | 30.2 |
| 28. | scaff_II.2328 | 33.3 | 27.3 | 56.7 | 38.8 | 38.9 | 35.2 | 29.2 | 38.8 | 55.9 | 27.9 | 38.9 | 35.7 | 52.8 |
| 29. | scaff_XIX.758 | 25.7 | 21.1 | 37.2 | 32.7 | 42.4 | 24.8 | 27.4 | 33.7 | 34.3 | 24.0 | 36.0 | 42.9 | 33.0 |
| 30. | TA45751_4081 | 40.7 | 37.5 | 37.2 | 49.0 | 32.6 | 33.3 | 23.9 | 49.0 | 35.4 | 22.5 | 57.3 | 26.8 | 29.2 |
| 31. | TA48119_4081 | 22.0 | 20.2 | 23.3 | 27.5 | 32.2 | 26.4 | 29.9 | 27.5 | 25.3 | 26.0 | 22.6 | 43.0 | 27.4 |
| 32. | TA35962_4081 | 29.4 | 26.2 | 33.3 | 35.5 | 48.1 | 30.6 | 37.6 | 37.4 | 36.5 | 34.1 | 34.6 | 40.2 | 36.1 |
| 33. | BI208422 | 30.1 | 23.4 | 51.1 | 34.7 | 33.7 | 28.7 | 24.8 | 34.7 | 49.5 | 21.7 | 36.0 | 35.7 | 47.2 |
| 34. | BG128975 | 28.9 | 25.3 | 50.0 | 30.4 | 36.6 | 33.3 | 25.6 | 30.4 | 50.0 | 25.6 | 27.7 | 33.6 | 49.6 |
| 35. | TA52374_4081 | 32.8 | 30.2 | 37.5 | 38.3 | 43.8 | 32.5 | 34.2 | 40.9 | 43.8 | 33.3 | 35.7 | 40.7 | 39.1 |
| 36. | TA37180_4081 | 31.4 | 24.8 | 51.0 | 34.3 | 37.5 | 30.6 | 25.6 | 33.3 | 49.5 | 24.0 | 35.4 | 36.6 | 49.1 |
| 37. | BE353147 | 28.2 | 24.5 | 34.3 | 33.3 | 49.0 | 32.1 | 35.9 | 35.2 | 34.0 | 31.0 | 32.4 | 36.6 | 38.9 |
| 38. | TA56938_4081 | 33.1 | 26.8 | 54.8 | 35.5 | 36.5 | 36.1 | 28.2 | 36.4 | 57.7 | 26.4 | 36.8 | 33.0 | 52.8 |
| 39. | BG130916 | 28.3 | 24.2 | 47.9 | 33.7 | 33.7 | 27.8 | 23.1 | 32.7 | 44.0 | 23.3 | 36.0 | 27.7 | 43.4 |
| 40. | SEQ ID NO: 276 | 27.2 | 24.5 | 46.5 | 35.9 | 34.2 | 34.5 | 32.5 | 35.0 | 48.2 | 31.0 | 32.5 | 34.8 | 50.9 |
| 41. | TA41886_4081 | 28.8 | 25.0 | 41.0 | 34.0 | 47.6 | 33.3 | 31.6 | 34.9 | 39.8 | 29.5 | 35.9 | 36.2 | 33.0 |
| 42. | TA36295_4081 | 30.4 | 27.1 | 38.5 | 36.9 | 43.0 | 30.6 | 31.6 | 36.9 | 39.8 | 27.9 | 36.5 | 44.6 | 38.7 |
| 43. | TA56201_4081 | 28.4 | 26.7 | 42.1 | 40.2 | 35.1 | 39.4 | 28.2 | 40.4 | 41.0 | 30.2 | 39.4 | 33.0 | 38.3 |
| 44. | AJ785329 | 19.3 | 19.4 | 37.9 | 26.3 | 24.7 | 22.2 | 18.8 | 25.3 | 36.0 | 16.3 | 28.9 | 21.4 | 31.8 |
| 45. | CA725087 | 32.2 | 29.2 | 68.1 | 30.5 | 29.7 | 25.8 | 23.3 | 30.5 | 78.4 | 21.4 | 31.4 | 27.1 | 39.0 |
| 46. | TA69823_4565 | 19.3 | 19.6 | 17.8 | 21.4 | 18.3 | 46.8 | 18.7 | 20.6 | 19.3 | 22.3 | 19.8 | 19.2 | 21.8 |
| 47. | TA53297_4565 | 30.7 | 27.1 | 41.7 | 42.9 | 97.8 | 30.8 | 34.2 | 44.9 | 40.6 | 33.3 | 31.5 | 36.8 | 34.9 |
| 48. | TA101332_4565 | 32.8 | 28.6 | 47.6 | 36.8 | 40.8 | 40.2 | 30.8 | 37.7 | 50.5 | 32.6 | 36.9 | 33.6 | 49.5 |
| 49. | TA66036_4565 | 65.5 | 58.6 | 37.1 | 79.6 | 43.2 | 40.2 | 31.1 | 83.7 | 35.3 | 26.7 | 53.2 | 35.7 | 34.9 |
| 50. | TA100367_4565 | 30.9 | 27.8 | 57.9 | 35.3 | 30.7 | 33.6 | 27.4 | 34.5 | 65.8 | 27.1 | 32.5 | 27.8 | 49.6 |
| 51. | TA92393_4565 | 33.3 | 26.8 | 84.2 | 38.7 | 39.8 | 33.3 | 30.8 | 37.5 | 94.1 | 26.4 | 38.8 | 33.9 | 50.9 |
| 52. | BM136027 | 64.6 | 57.8 | 37.1 | 78.6 | 42.1 | 39.3 | 30.3 | 82.7 | 36.3 | 28.2 | 53.2 | 35.7 | 37.6 |
| 53. | CA705831 | | 81.3 | 35.3 | 65.8 | 31.6 | 31.0 | 25.4 | 68.4 | 33.9 | 24.0 | 45.1 | 26.9 | 31.3 |
| 54. | CA593033 | 82.8 | | 28.2 | 60.6 | 27.9 | 30.1 | 23.5 | 61.4 | 27.2 | 22.4 | 41.4 | 23.5 | 24.5 |
| 55. | CK153563 | 40.7 | 32.8 | | 41.6 | 37.2 | 32.4 | 28.2 | 41.6 | 87.9 | 26.4 | 40.4 | 31.3 | 50.0 |
| 56. | TA66038_4565 | 71.7 | 65.6 | 50.0 | | 42.9 | 39.3 | 27.7 | 94.9 | 38.2 | 28.2 | 52.0 | 32.2 | 34.9 |
| 57. | TA52915_4565 | 43.4 | 38.3 | 52.1 | 51.0 | | 30.8 | 34.2 | 44.9 | 40.6 | 32.6 | 31.5 | 36.3 | 35.8 |
| 58. | TA69821_4565 | 44.2 | 40.6 | 42.1 | 49.5 | 39.3 | | 28.8 | 38.2 | 33.3 | 27.7 | 37.6 | 27.8 | 34.2 |
| 59. | TA95153_4565 | 41.0 | 38.3 | 35.9 | 38.5 | 48.7 | 39.3 | | 28.6 | 29.9 | 76.7 | 31.6 | 31.4 | 26.5 |
| 60. | CD899399 | 72.6 | 64.8 | 49.0 | 96.9 | 52.0 | 47.7 | 36.8 | | 38.2 | 29.0 | 53.1 | 33.0 | 36.7 |
| 61. | TA77646_4565 | 41.6 | 33.6 | 88.9 | 44.4 | 51.5 | 45.8 | 38.5 | 46.5 | | 27.1 | 39.6 | 33.9 | 51.9 |
| 62. | TA51752_4565 | 38.0 | 38.8 | 34.1 | 38.8 | 45.0 | 39.5 | 82.9 | 37.2 | 34.9 | | 30.2 | 30.0 | 27.1 |
| 63. | Pop_GASA | 50.4 | 45.3 | 52.1 | 61.2 | 44.6 | 49.5 | 39.3 | 61.2 | 52.5 | 39.5 | | 32.1 | 40.2 |
| 64. | Mt_GASA | 43.4 | 39.1 | 41.1 | 46.4 | 48.2 | 42.0 | 43.6 | 47.3 | 46.4 | 42.6 | 46.4 | | 33.0 |
| 65. | At2g30810 | 41.6 | 33.6 | 58.5 | 45.3 | 48.1 | 45.8 | 41.0 | 45.3 | 60.4 | 40.3 | 53.8 | 48.2 | |
| 66. | At3g02885 | 46.9 | 38.3 | 64.9 | 51.0 | 51.5 | 45.8 | 41.0 | 52.0 | 66.7 | 37.2 | 54.6 | 47.3 | 61.3 |
| 67. | At5g15230 | 38.1 | 33.6 | 62.3 | 48.1 | 42.5 | 43.0 | 39.3 | 48.1 | 65.1 | 38.8 | 46.2 | 49.1 | 55.7 |
| 68. | At1g74670 | 42.5 | 37.5 | 64.4 | 48.5 | 46.5 | 45.8 | 40.2 | 47.5 | 68.3 | 39.5 | 50.5 | 47.3 | 64.2 |

| | | 66 | 67 | 68 |
|---|---|---|---|---|
| 1. | TA5035_4679 | 48.0 | 50.0 | 59.4 |
| 2. | TA5923_4679 | 47.9 | 45.0 | 49.6 |
| 3. | Os05g0376800 | 35.5 | 32.2 | 39.5 |
| 4. | Os04g0465300 | 37.6 | 33.6 | 34.6 |
| 5. | Os10g0115550 | 42.7 | 37.5 | 40.7 |
| 6. | AK105729 | 33.9 | 31.7 | 34.2 |
| 7. | Os05g0432200 | 39.2 | 31.1 | 37.6 |
| 8. | Os09g0414900 | 47.0 | 41.9 | 47.0 |
| 9. | Os03g0607200 | 34.0 | 30.3 | 27.9 |
| 10. | Os07g0592000 | 38.8 | 27.9 | 33.3 |
| 11. | AK110640 | 39.2 | 31.1 | 37.6 |
| 12. | Os06g0266800 | 52.6 | 49.1 | 48.5 |
| 13. | Os03g0760800 | 41.0 | 30.3 | 35.6 |
| 14. | scaff_205.30 | 35.3 | 33.0 | 35.9 |
| 15. | scaff_II.204 | 35.6 | 32.7 | 38.8 |
| 16. | scaff_II.2330 | 45.5 | 36.4 | 40.5 |
| 17. | scaff_VI.397 | 54.0 | 44.4 | 54.5 |
| 18. | scf_XVII.377 | 55.5 | 67.6 | 63.6 |
| 19. | scaff_II.202 | 40.2 | 33.0 | 38.2 |
| 20. | scaff_I.2410 | 35.1 | 31.1 | 31.7 |
| 21. | scaff_I.1483 | 51.3 | 52.2 | 53.1 |
| 22. | scaff_I.1926 | 15.9 | 14.7 | 14.7 |
| 23. | scaff_XII.704 | 27.6 | 25.2 | 29.4 |
| 24. | scaff_41.75 | 43.3 | 33.0 | 37.6 |
| 25. | scaff_40.379 | 44.3 | 38.7 | 35.6 |
| 26. | scaff_XV.507 | 37.0 | 30.8 | 38.2 |
| 27. | scaff_II.203 | 32.0 | 25.5 | 30.7 |
| 28. | scaff_II.2328 | 64.9 | 47.2 | 54.5 |
| 29. | scaff_XIX.758 | 36.1 | 34.0 | 35.6 |
| 30. | TA45751_4081 | 33.0 | 29.2 | 31.7 |
| 31. | TA48119_4081 | 28.8 | 24.0 | 27.4 |
| 32. | TA35962_4081 | 35.6 | 34.0 | 38.5 |
| 33. | BI208422 | 57.7 | 45.3 | 54.5 |
| 34. | BG128975 | 54.0 | 47.8 | 53.6 |
| 35. | TA52374_4081 | 33.3 | 31.3 | 36.8 |
| 36. | TA37180_4081 | 61.0 | 49.5 | 58.3 |
| 37. | BE353147 | 34.6 | 31.8 | 34.3 |
| 38. | TA56938_4081 | 55.1 | 63.2 | 64.4 |
| 39. | BG130916 | 48.5 | 42.5 | 48.5 |
| 40. | SEQ ID NO: 276 | 46.5 | 43.9 | 53.5 |
| 41. | TA41886_4081 | 35.9 | 33.3 | 34.0 |
| 42. | TA36295_4081 | 35.9 | 40.0 | 41.3 |
| 43. | TA56201_4081 | 42.4 | 37.6 | 40.2 |
| 44. | AJ785329 | 32.7 | 32.7 | 33.3 |
| 45. | CA725087 | 45.3 | 42.7 | 42.4 |
| 46. | TA69823_4565 | 21.8 | 17.8 | 21.3 |
| 47. | TA53297_4565 | 41.2 | 35.8 | 32.7 |
| 48. | TA101332_4565 | 51.9 | 41.5 | 45.6 |
| 49. | TA66036_4565 | 41.0 | 30.3 | 35.6 |
| 50. | TA100367_4565 | 43.6 | 45.6 | 42.1 |
| 51. | TA92393_4565 | 53.8 | 54.2 | 49.5 |
| 52. | BM136027 | 42.0 | 31.2 | 35.6 |
| 53. | CA705831 | 36.1 | 23.4 | 31.7 |
| 54. | CA593033 | 29.9 | 21.0 | 27.5 |
| 55. | CK153563 | 55.7 | 52.3 | 51.5 |
| 56. | TA66038_4565 | 39.2 | 33.0 | 36.5 |
| 57. | TA52915_4565 | 41.2 | 34.9 | 32.7 |
| 58. | TA69821_4565 | 37.0 | 28.7 | 33.3 |
| 59. | TA95153_4565 | 31.1 | 29.1 | 30.8 |
| 60. | CD899399 | 41.7 | 33.0 | 35.6 |
| 61. | TA77646_4565 | 58.6 | 54.2 | 53.5 |
| 62. | TA51752_4565 | 28.7 | 28.7 | 26.4 |
| 63. | Pop_GASA | 38.4 | 33.0 | 38.2 |
| 64. | Mt_GASA | 33.0 | 30.1 | 33.9 |
| 65. | At2g30810 | 50.9 | 45.3 | 50.9 |
| 66. | At3g02885 | | 50.0 | 54.4 |
| 67. | At5g15230 | 61.3 | | 57.5 |
| 68. | At1g74670 | 65.3 | 67.9 | |

### 3.4. Auxin/Indoleacetic Acid Genes (AUX/IAA)

[0532] Global percentages of similarity and identity between full length polypeptide sequences useful in performing the methods of the invention were determined using one of the methods available in the art, the MatGAT (Matrix Global Alignment Tool) software (BMC Bioinformatics. 2003 4:29. MatGAT: an application that generates similarity/identity matrices using protein or DNA sequences. Campanella J J, Bitincka L, Smalley J; software hosted by Ledion Bitincka). MatGAT software generates similarity/identity matrices for DNA or protein sequences without needing pre-alignment of the data. The program performs a series of pair-wise alignments using the Myers and Miller global alignment algorithm (with a gap opening penalty of 12, and a gap extension penalty of 2), calculates similarity and identity using for example Blosum 62 (for polypeptides), and then places the results in a distance matrix.

[0533] Parameters that may be used in the comparison:
[0534] Scoring matrix: Blosum62
[0535] First Gap: 12
[0536] Extending gap: 2

### 3.5. IAA14 Polypeptides

[0537] Global percentages of similarity and identity between full length polypeptide sequences useful in performing the methods of the invention were determined using one of the methods available in the art, the MatGAT (Matrix Global Alignment Tool) software (BMC Bioinformatics. 2003 4:29. MatGAT: an application that generates similarity/identity matrices using protein or DNA sequences. Campanella J J, Bitincka L, Smalley J; software hosted by Ledion Bitincka). MatGAT software generates similarity/identity matrices for DNA or protein sequences without needing pre-alignment of the data. The program performs a series of pair-wise alignments using the Myers and Miller global alignment algorithm (with a gap opening penalty of 12, and a gap extension penalty of 2), calculates similarity and identity using for example Blosum 62 (for polypeptides), and then places the results in a distance matrix. Sequence similarity is shown in the bottom half of the dividing line and sequence identity is shown in the top half of the diagonal dividing line.

[0538] Parameters used in the comparison were:
[0539] Scoring matrix: Blosum62
[0540] First Gap: 12
[0541] Extending gap: 2

[0542] Results of the software analysis are shown in Table C3 for the global similarity and identity over the full length of the polypeptide sequences. Percentage identity is given above the diagonal and percentage similarity is given below the diagonal.

[0543] The percentage identity between the IAA14-like polypeptide sequences useful in performing the methods of the invention can be as low as 26.3% amino acid identity compared to SEQ ID NO: 738 (A. thaliana_AT4G14550.1), but is usually above 35%.

TABLE C3
MatGAT results for global similarity and identity over the full length of the polypeptide sequences.

| | | 1 | 2 | 3 | 4 | 5 | 6 | 7 | 8 | 9 | 10 | 11 | 12 |
|---|---|---|---|---|---|---|---|---|---|---|---|---|---|
| 1. | A. thaliana_AT4G14550.1#1 | | 80.7 | 68.6 | 63.6 | 70.5 | 73.7 | 67.2 | 66.8 | 26.3 | 54.5 | 61.4 | 64.2 |
| 2. | A. thaliana_AT3G23050.1#1 | 84.8 | | 86.4 | 63.3 | 68.1 | 70.2 | 63.9 | 63.5 | 24.7 | 55.8 | 60.2 | 64.3 |
| 3. | A. thaliana_AT3G23050.2#1 | 76.3 | 86.4 | | 53.6 | 57.5 | 58.6 | 53.5 | 53.6 | 12.0 | 45.0 | 49.2 | 53.2 |
| 4. | P. trichocarpa_566151#1 | 72.2 | 72.9 | 61.4 | | 85.6 | 66.9 | 63.3 | 57.3 | 21.3 | 56.6 | 57.8 | 54.5 |
| 5. | P. trichocarpa_720961#1 | 79.0 | 81.0 | 68.5 | 87.4 | | 74.3 | 70.9 | 63.9 | 23.8 | 54.2 | 63.6 | 59.9 |
| 6. | M. truncatula_TA20354_3880#1 | 81.4 | 79.8 | 69.1 | 75.8 | 83.5 | | 72.3 | 64.4 | 26.3 | 55.8 | 61.2 | 63.9 |
| 7. | S. lycopersicum_TA40922_4081#1 | 76.3 | 77.4 | 66.9 | 70.4 | 78.2 | 83.1 | | 60.5 | 24.6 | 55.3 | 59.4 | 62.5 |
| 8. | A. thaliana_AT1G04250.1#1 | 82.5 | 77.0 | 67.7 | 67.5 | 75.4 | 77.1 | 74.6 | | 22.3 | 50.2 | 55.5 | 59.3 |
| 9. | O. sativa_CB657009#1 | 27.2 | 26.3 | 15.2 | 23.1 | 25.4 | 26.7 | 25.8 | 26.6 | | 23.8 | 24.1 | 25.4 |
| 10. | O. sativa_TA41733_4530#1 | 64.6 | 66.8 | 55.2 | 71.1 | 67.9 | 66.8 | 63.9 | 59.9 | 23.8 | | 55.7 | 54.2 |
| 11. | M. truncatula_TA20951_3880#1 | 71.9 | 73.1 | 60.5 | 69.0 | 76.3 | 71.5 | 69.6 | 68.4 | 25.7 | 67.1 | | 63.5 |
| 12. | A. thaliana_AT3G04730.1#1 | 75.8 | 77.8 | 66.5 | 67.9 | 75.8 | 78.8 | 77.1 | 74.6 | 27.5 | 64.6 | 73.5 | |
| 13. | S. lycopersicum_TA48108_4081#1 | 69.7 | 67.9 | 63.3 | 62.1 | 68.5 | 72.0 | 69.5 | 71.2 | 29.8 | 56.0 | 66.8 | 71.6 |
| 14. | M. truncatula_TA27011_3880#1 | 58.5 | 59.5 | 51.2 | 61.5 | 60.9 | 59.2 | 57.5 | 54.8 | 18.7 | 55.2 | 58.5 | 58.2 |
| 15. | M. truncatula_TA22814_3880#1 | 71.0 | 72.2 | 60.0 | 65.7 | 72.2 | 74.3 | 71.4 | 71.4 | 25.7 | 59.6 | 70.4 | 71.4 |
| 16. | P. trichocarpa_643213#1 | 75.9 | 75.7 | 64.6 | 68.2 | 74.2 | 79.7 | 78.9 | 74.3 | 27.0 | 66.4 | 73.9 | 76.8 |
| 17. | A. thaliana_AT3G23030.1#1 | 51.8 | 48.1 | 47.6 | 44.0 | 48.8 | 50.8 | 49.2 | 52.8 | 25.3 | 44.0 | 47.8 | 48.7 |
| 18. | A. thaliana_AT4G14560.1#1 | 53.5 | 48.6 | 48.6 | 46.2 | 50.0 | 53.0 | 51.3 | 54.1 | 29.8 | 45.5 | 50.6 | 52.1 |
| 19. | A. thaliana_AT1G04240.1#1 | 54.8 | 53.5 | 53.3 | 46.9 | 53.6 | 54.7 | 53.0 | 55.0 | 26.5 | 47.7 | 53.8 | 54.2 |
| 20. | S. lycopersicum_TA38817_4081#1 | 54.8 | 52.7 | 52.4 | 46.2 | 51.2 | 49.2 | 51.3 | 52.0 | 23.7 | 44.8 | 50.2 | 50.4 |
| 21. | S. lycopersicum_TA43058_4081#1 | 55.3 | 53.1 | 53.3 | 48.4 | 55.6 | 53.8 | 51.3 | 56.8 | 23.0 | 47.3 | 53.4 | 55.1 |
| 22. | P. trichocarpa_726443#1 | 54.4 | 53.5 | 53.8 | 43.3 | 48.8 | 52.1 | 49.2 | 55.0 | 24.0 | 48.0 | 48.6 | 55.5 |
| 23. | P. trichocarpa_564913#1 | 57.9 | 52.7 | 51.4 | 48.7 | 51.6 | 54.7 | 53.4 | 59.8 | 23.2 | 51.6 | 51.4 | 53.8 |
| 24. | P. trichocarpa_831610#1 | 57.9 | 56.0 | 55.7 | 49.8 | 54.8 | 56.4 | 55.5 | 57.2 | 25.1 | 50.2 | 53.0 | 58.1 |
| 25. | P. trichocarpa_798526#1 | 56.6 | 55.1 | 54.8 | 48.4 | 54.8 | 57.6 | 55.9 | 57.6 | 23.6 | 49.1 | 53.8 | 57.6 |
| 26. | M. truncatula_TA20557_3880#1 | 55.7 | 53.9 | 53.8 | 44.8 | 50.4 | 52.5 | 51.7 | 55.0 | 26.4 | 47.3 | 50.6 | 53.0 |
| 27. | M. truncatula_TA20558_3880#1 | 55.3 | 49.8 | 49.0 | 46.9 | 53.6 | 51.7 | 53.8 | 54.1 | 26.3 | 48.0 | 50.6 | 55.9 |
| 28. | P. trichocarpa_823671#1 | 58.3 | 53.9 | 54.3 | 48.0 | 54.0 | 56.4 | 54.7 | 57.6 | 23.2 | 49.8 | 53.8 | 55.5 |
| 29. | P. trichocarpa_595419#1 | 57.0 | 55.1 | 55.7 | 47.3 | 53.6 | 55.9 | 54.7 | 55.9 | 23.4 | 48.4 | 52.6 | 53.8 |
| 30. | M. truncatula_TA31746_3880#1 | 56.6 | 55.1 | 54.8 | 49.5 | 54.0 | 53.8 | 53.8 | 58.5 | 25.0 | 48.4 | 54.2 | 55.9 |
| 31. | S. lycopersicum_TA42190_4081#1 | 54.4 | 53.9 | 52.9 | 49.5 | 55.2 | 55.9 | 53.8 | 54.1 | 25.9 | 50.9 | 54.2 | 55.5 |
| 32. | A. thaliana_AT4G29080.1#1 | 53.1 | 54.4 | 44.9 | 57.7 | 55.1 | 54.4 | 50.8 | 52.1 | 19.3 | 57.7 | 58.0 | 53.8 |
| 33. | M. truncatula_TA25400_3880#1 | 46.5 | 43.2 | 35.7 | 37.2 | 41.5 | 41.9 | 43.6 | 45.0 | 45.5 | 40.4 | 41.5 | 44.1 |
| 34. | P. trichocarpa_711734#1 | 47.0 | 49.6 | 41.0 | 51.0 | 48.1 | 48.7 | 48.1 | 48.1 | 17.8 | 51.3 | 53.3 | 48.7 |
| 35. | P. trichocarpa_584053#1 | 51.8 | 56.7 | 46.6 | 53.7 | 55.4 | 53.4 | 55.7 | 53.1 | 20.2 | 57.0 | 56.0 | 53.4 |
| 36. | M. truncatula_TA23062_3880#1 | 46.4 | 50.1 | 41.5 | 50.4 | 47.6 | 46.1 | 47.0 | 48.4 | 17.9 | 51.6 | 50.7 | 47.8 |
| | | 13 | 14 | 15 | 16 | 17 | 18 | 19 | 20 | 21 | 22 | 23 | 24 |
| 1. | A. thaliana_AT4G14550.1#1 | 58.5 | 49.3 | 62.5 | 63.2 | 40.6 | 42.3 | 41.8 | 41.8 | 42.7 | 43.5 | 45.6 | 45.5 |
| 2. | A. thaliana_AT3G23050.1#1 | 57.3 | 48.4 | 61.2 | 62.0 | 39.8 | 38.9 | 43.0 | 40.2 | 41.6 | 41.4 | 41.5 | 45.3 |
| 3. | A. thaliana_AT3G23050.2#1 | 46.1 | 41.9 | 50.4 | 50.2 | 35.0 | 35.3 | 37.9 | 34.6 | 36.5 | 38.3 | 36.0 | 39.7 |
| 4. | P. trichocarpa_566151#1 | 54.3 | 44.3 | 56.4 | 56.6 | 36.6 | 37.5 | 38.8 | 38.1 | 38.8 | 36.5 | 41.2 | 40.8 |
| 5. | P. trichocarpa_720961#1 | 58.3 | 46.9 | 60.8 | 61.2 | 38.8 | 39.9 | 43.8 | 42.0 | 44.2 | 40.3 | 42.7 | 43.5 |
| 6. | M. truncatula_TA20354_3880#1 | 61.3 | 50.2 | 64.7 | 68.0 | 42.2 | 42.8 | 44.5 | 42.7 | 43.5 | 41.8 | 44.6 | 45.8 |
| 7. | S. lycopersicum_TA40922_4081#1 | 61.6 | 45.0 | 60.7 | 64.3 | 39.3 | 41.3 | 44.6 | 40.5 | 42.7 | 39.8 | 41.9 | 45.0 |
| 8. | A. thaliana_AT1G04250.1#1 | 58.6 | 44.3 | 58.8 | 59.3 | 43.3 | 42.8 | 45.9 | 41.5 | 45.5 | 41.6 | 46.1 | 45.4 |
| 9. | O. sativa_CB657009#1 | 26.9 | 16.4 | 24.1 | 24.9 | 20.9 | 22.9 | 21.3 | 20.2 | 20.1 | 19.0 | 20.0 | 21.5 |
| 10. | O. sativa_TA41733_4530#1 | 50.0 | 42.0 | 49.8 | 57.0 | 34.9 | 36.6 | 37.9 | 37.5 | 38.9 | 39.9 | 42.0 | 43.4 |
| 11. | M. truncatula_TA20951_3880#1 | 57.6 | 47.2 | 61.2 | 64.7 | 37.9 | 39.9 | 43.5 | 39.1 | 43.5 | 39.9 | 40.9 | 45.5 |
| 12. | A. thaliana_AT3G04730.1#1 | 60.2 | 45.9 | 57.8 | 62.5 | 40.3 | 41.9 | 42.5 | 39.2 | 43.8 | 41.1 | 42.2 | 45.2 |
| 13. | S. lycopersicum_TA48108_4081#1 | | 45.2 | 58.7 | 60.9 | 43.9 | 46.2 | 47.4 | 44.1 | 47.2 | 43.5 | 44.9 | 47.2 |
| 14. | M. truncatula_TA27011_3880#1 | 52.8 | | 57.5 | 55.5 | 30.1 | 32.0 | 34.7 | 31.9 | 33.7 | 32.2 | 33.0 | 32.3 |
| 15. | M. truncatula_TA22814_3880#1 | 66.9 | 67.6 | | 67.7 | 39.6 | 43.5 | 43.7 | 42.0 | 42.5 | 40.0 | 41.9 | 41.9 |
| 16. | P. trichocarpa_643213#1 | 70.0 | 64.5 | 78.0 | | 40.1 | 43.5 | 41.8 | 40.4 | 40.6 | 41.3 | 44.4 | 45.6 |
| 17. | A. thaliana_AT3G23030.1#1 | 53.4 | 39.5 | 50.6 | 49.4 | | 75.0 | 57.5 | 61.7 | 62.4 | 60.7 | 57.5 | 60.5 |
| 18. | A. thaliana_AT4G14560.1#1 | 56.7 | 41.1 | 50.6 | 52.3 | 85.1 | | 60.2 | 60.5 | 59.7 | 59.8 | 57.2 | 59.0 |
| 19. | A. thaliana_AT1G04240.1#1 | 61.5 | 42.8 | 50.6 | 53.2 | 68.3 | 69.8 | | 62.6 | 65.5 | 59.8 | 57.1 | 58.1 |
| 20. | S. lycopersicum_TA38817_4081#1 | 56.3 | 43.8 | 52.2 | 52.3 | 71.6 | 68.9 | 75.3 | | 77.6 | 67.2 | 65.6 | 63.4 |
| 21. | S. lycopersicum_TA43058_4081#1 | 60.6 | 43.5 | 51.4 | 52.3 | 68.9 | 67.9 | 75.5 | 84.2 | | 66.3 | 63.3 | 64.9 |
| 22. | P. trichocarpa_726443#1 | 59.1 | 41.5 | 50.6 | 52.3 | 69.8 | 66.7 | 73.4 | 80.2 | 77.0 | | 83.7 | 68.3 |
| 23. | P. trichocarpa_564913#1 | 60.1 | 41.8 | 51.8 | 56.5 | 65.7 | 63.8 | 70.0 | 73.9 | 73.4 | 87.0 | | 66.2 |
| 24. | P. trichocarpa_831610#1 | 62.0 | 42.8 | 51.8 | 57.4 | 69.2 | 68.2 | 73.3 | 74.4 | 76.5 | 79.5 | 74.4 | |
| 25. | P. trichocarpa_798526#1 | 61.1 | 43.8 | 51.0 | 57.0 | 67.3 | 67.3 | 70.4 | 73.9 | 76.4 | 77.4 | 73.9 | 95.0 |
| 26. | M. truncatula_TA20557_3880#1 | 57.2 | 42.1 | 50.6 | 54.9 | 75.8 | 74.7 | 75.1 | 75.3 | 74.5 | 80.7 | 73.4 | 77.4 |
| 27. | M. truncatula_TA20558_3880#1 | 60.1 | 42.1 | 50.2 | 54.0 | 67.2 | 68.8 | 74.1 | 77.9 | 75.0 | 78.6 | 74.4 | 80.0 |
| 28. | P. trichocarpa_823671#1 | 62.0 | 44.8 | 52.2 | 56.5 | 63.5 | 63.1 | 71.9 | 75.4 | 74.9 | 75.9 | 73.9 | 80.3 |
| 29. | P. trichocarpa_595419#1 | 63.0 | 45.2 | 53.9 | 53.2 | 67.7 | 64.2 | 73.1 | 77.6 | 74.6 | 76.6 | 72.0 | 81.1 |
| 30. | M. truncatula_TA31746_3880#1 | 61.1 | 42.1 | 52.7 | 56.1 | 63.2 | 65.7 | 71.1 | 70.6 | 72.1 | 72.5 | 71.5 | 82.8 |
| 31. | S. lycopersicum_TA42190_4081#1 | 58.7 | 44.1 | 51.4 | 55.3 | 68.6 | 71.4 | 75.7 | 72.6 | 74.0 | 75.0 | 67.6 | 76.4 |
| 32. | A. thaliana_AT4G29080.1#1 | 49.8 | 51.1 | 54.4 | 55.1 | 42.0 | 41.3 | 47.9 | 44.3 | 44.9 | 45.6 | 46.9 | 48.5 |
| 33. | M. truncatula_TA25400_3880#1 | 49.5 | 33.4 | 42.4 | 45.1 | 44.8 | 50.0 | 42.3 | 41.6 | 39.8 | 39.6 | 40.6 | 41.5 |
| 34. | P. trichocarpa_711734#1 | 45.6 | 49.9 | 48.7 | 49.3 | 35.5 | 37.5 | 38.7 | 37.2 | 38.7 | 39.0 | 40.4 | 40.4 |
| 35. | P. trichocarpa_584053#1 | 50.2 | 51.8 | 53.7 | 53.7 | 39.4 | 41.0 | 42.7 | 42.0 | 43.3 | 44.0 | 44.6 | 44.0 |
| 36. | M. truncatula_TA23062_3880#1 | 43.8 | 47.0 | 47.3 | 48.7 | 35.7 | 36.3 | 39.8 | 38.9 | 37.8 | 39.8 | 38.9 | 41.5 |
| | | 25 | 26 | 27 | 28 | 29 | 30 | 31 | 32 | 33 | 34 | 35 | 36 |
| 1. | A. thaliana_AT4G14550.1#1 | 43.1 | 42.9 | 44.0 | 43.2 | 41.7 | 44.4 | 42.4 | 43.0 | 36.1 | 38.4 | 43.3 | 36.5 |
| 2. | A. thaliana_AT3G23050.1#1 | 41.8 | 41.9 | 40.7 | 42.6 | 42.4 | 43.8 | 42.3 | 43.1 | 33.9 | 39.1 | 43.2 | 37.3 |
| 3. | A. thaliana_AT3G23050.2#1 | 36.6 | 37.4 | 35.0 | 37.4 | 37.3 | 38.2 | 36.6 | 35.7 | 25.0 | 31.7 | 35.1 | 31.5 |
| 4. | P. trichocarpa_566151#1 | 38.6 | 37.9 | 36.5 | 39.7 | 37.9 | 40.4 | 38.3 | 41.8 | 31.5 | 40.0 | 41.7 | 37.0 |
| 5. | P. trichocarpa_720961#1 | 43.5 | 42.3 | 41.1 | 44.8 | 42.7 | 43.5 | 42.3 | 43.3 | 34.8 | 39.5 | 43.6 | 36.6 |
| 6. | M. truncatula_TA20354_3880#1 | 43.9 | 42.3 | 40.8 | 44.6 | 42.6 | 43.3 | 43.9 | 43.6 | 35.3 | 39.3 | 41.9 | 36.7 |
| 7. | S. lycopersicum_TA40922_4081#1 | 42.3 | 39.0 | 41.9 | 42.1 | 42.6 | 44.1 | 41.8 | 43.6 | 37.4 | 41.5 | 45.9 | 37.6 |
| 8. | A. thaliana_AT1G04250.1#1 | 44.6 | 40.8 | 43.2 | 45.9 | 42.4 | 44.0 | 42.4 | 42.6 | 35.9 | 37.4 | 41.2 | 36.4 |
| 9. | O. sativa_CB657009#1 | 19.6 | 22.6 | 22.2 | 19.4 | 20.6 | 22.1 | 23.2 | 17.0 | 37.9 | 15.5 | 17.3 | 14.7 |
| 10. | O. sativa_TA41733_4530#1 | 40.3 | 38.2 | 39.0 | 42.3 | 40.1 | 40.1 | 39.5 | 44.6 | 33.2 | 41.3 | 42.2 | 40.5 |
| 11. | M. truncatula_TA20951_3880#1 | 43.9 | 40.7 | 39.5 | 44.1 | 43.3 | 42.9 | 45.5 | 48.0 | 34.9 | 42.4 | 45.0 | 40.9 |
| 12. | A. thaliana_AT3G04730.1#1 | 42.9 | 42.4 | 42.8 | 41.9 | 43.0 | 41.2 | 44.9 | 42.0 | 35.7 | 37.5 | 41.4 | 36.7 |
| 13. | S. lycopersicum_TA48108_4081#1 | 46.8 | 44.1 | 46.7 | 46.6 | 46.1 | 45.3 | 48.1 | 39.9 | 41.1 | 38.3 | 41.7 | 35.1 |
| 14. | M. truncatula_TA27011_3880#1 | 33.0 | 33.7 | 33.3 | 33.9 | 33.8 | 35.3 | 35.0 | 33.7 | 26.6 | 31.1 | 33.1 | 30.4 |
| 15. | M. truncatula_TA22814_3880#1 | 42.1 | 41.5 | 40.0 | 42.4 | 41.5 | 41.5 | 42.4 | 44.1 | 36.4 | 39.1 | 43.1 | 37.5 |
| 16. | P. trichocarpa_643213#1 | 44.4 | 44.0 | 45.0 | 43.0 | 42.0 | 44.3 | 43.0 | 43.6 | 38.1 | 40.7 | 43.7 | 38.0 |
| 17. | A. thaliana_AT3G23030.1#1 | 57.4 | 58.0 | 56.9 | 54.6 | 54.2 | 54.6 | 55.6 | 34.1 | 36.0 | 28.9 | 30.9 | 27.3 |
| 18. | A. thaliana_AT4G14560.1#1 | 56.8 | 58.1 | 58.3 | 57.6 | 57.2 | 55.9 | 58.1 | 33.4 | 36.6 | 30.9 | 33.6 | 29.1 |
| 19. | A. thaliana_AT1G04240.1#1 | 58.4 | 59.0 | 59.7 | 60.5 | 60.6 | 56.5 | 58.5 | 37.7 | 31.6 | 29.8 | 33.9 | 30.3 |
| 20. | S. lycopersicum_TA38817_4081#1 | 61.9 | 62.6 | 64.2 | 61.8 | 62.4 | 61.2 | 59.3 | 35.4 | 31.9 | 29.5 | 33.2 | 30.3 |
| 21. | S. lycopersicum_TA43058_4081#1 | 62.4 | 61.7 | 61.8 | 60.9 | 59.5 | 62.6 | 61.0 | 37.0 | 32.4 | 30.7 | 34.7 | 30.3 |
| 22. | P. trichocarpa_726443#1 | 66.3 | 69.4 | 64.9 | 65.4 | 62.6 | 61.8 | 60.1 | 38.4 | 30.5 | 32.3 | 36.2 | 30.3 |
| 23. | P. trichocarpa_564913#1 | 63.5 | 62.3 | 63.0 | 62.9 | 59.7 | 61.0 | 55.8 | 39.0 | 32.2 | 33.7 | 37.5 | 30.8 |
| 24. | P. trichocarpa_831610#1 | 92.0 | 62.8 | 66.8 | 69.1 | 67.3 | 70.0 | 65.2 | 38.7 | 31.8 | 34.1 | 37.0 | 33.4 |
| 25. | P. trichocarpa_798526#1 | | 62.3 | 64.5 | 66.8 | 65.0 | 69.1 | 62.2 | 37.4 | 31.7 | 33.2 | 36.2 | 33.1 |
| 26. | M. truncatula_TA20557_3880#1 | 74.9 | | 69.4 | 60.9 | 61.0 | 58.8 | 59.0 | 36.7 | 33.2 | 27.8 | 32.9 | 29.7 |
| 27. | M. truncatula_TA20558_3880#1 | 77.4 | 81.7 | | 65.0 | 63.7 | 61.5 | 56.3 | 33.8 | 33.5 | 30.1 | 35.5 | 31.7 |
| 28. | P. trichocarpa_823671#1 | 80.8 | 72.9 | 75.4 | | 89.2 | 63.8 | 57.8 | 38.0 | 31.9 | 33.2 | 36.2 | 32.6 |
| 29. | P. trichocarpa_595419#1 | 82.1 | 74.1 | 75.6 | 94.6 | | 62.7 | 57.8 | 39.7 | 31.7 | 31.5 | 35.5 | 32.3 |
| 30. | M. truncatula_TA31746_3880#1 | 82.8 | 73.0 | 73.5 | 76.5 | 77.5 | | 60.1 | 38.8 | 31.6 | 33.5 | 38.4 | 34.8 |
| 31. | S. lycopersicum_TA42190_4081#1 | 73.9 | 76.2 | 75.3 | 73.9 | 73.6 | 71.6 | | 37.7 | 32.1 | 30.9 | 38.1 | 29.1 |
| 32. | A. thaliana_AT4G29080.1#1 | 48.2 | 43.3 | 44.9 | 47.2 | 47.9 | 46.9 | 45.9 | | 32.5 | 54.6 | 57.7 | 45.3 |
| 33. | M. truncatula_TA25400_3880#1 | 42.2 | 44.9 | 44.1 | 41.9 | 40.8 | 40.2 | 44.3 | 36.7 | | 30.7 | 36.2 | 28.0 |
| 34. | P. trichocarpa_711734#1 | 39.8 | 36.4 | 36.4 | 39.5 | 39.3 | 40.1 | 39.3 | 66.8 | 35.2 | | 61.4 | 49.1 |
| 35. | P. trichocarpa_584053#1 | 44.6 | 43.0 | 42.0 | 46.3 | 45.0 | 46.9 | 46.3 | 69.4 | 39.1 | 69.1 | | 47.3 |
| 36. | M. truncatula_TA23062_3880#1 | 41.8 | 38.9 | 39.8 | 40.6 | 40.6 | 43.2 | 38.6 | 58.5 | 32.0 | 65.6 | 59.7 | |

### Example 4

### Identification of Domains Comprised in Polypeptide Sequences Useful in Performing The Methods of the Invention

### 4.1. Aspartate AminoTransferase (ASPAT)

[0544] The Integrated Resource of Protein Families, Domains and Sites (InterPro) database is an integrated interface for the commonly used signature databases for text- and sequence-based searches. The InterPro database combines these databases, which use different methodologies and varying degrees of biological information about well-characterized proteins to derive protein signatures. Collaborating databases include SWISS-PROT, PROSITE, TrEMBL, PRINTS, Propom and Pfam, Smart and TIGRFAMs. Pfam is a large collection of multiple sequence alignments and hidden Markov models covering many common protein domains and families. Pfam is hosted at the Sanger Institute server in the United Kingdom. Interpro is hosted at the European Bioinformatics Institute in the United Kingdom.

[0545] The results of the InterPro scan of the polypeptide sequence as represented by SEQ ID NO: 4, by SEQ ID NO: 2 and by SEQ ID NO: 6 are presented in Table D1, Table D2 and Table D3, respectively.

[0546] Tables D1, D2, D3: InterPro scan results (major accession numbers) of the polypeptide sequence as represented by SEQ ID NO: 4, SEQ ID NO: 2 and SEQ ID NO: 6 respectively.

TABLE D1

| | | | Amino Acid | |
|---|---|---|---|---|
| | | | Coordinates in on | |
| | | | SEQ ID NO: 2, | |
| Database | Accession number | Accession name | (Start-End) | e-value |
| InterPro | IPR000796 | Aspartate/other aminotransferase | | |
| HMMPanther | PTHR11879 | ASPARTATE AMINOTRANSFERASE | [1-204] | 2.6e−123 |
| InterPro | IPR004839 | Aminotransferase, class I and II | class | |
| HMMPfam | PF00155 | Aminotran_1_2 | [31-203] | 8.3e−61 |
| InterPro | IPR015421 | Pyridoxal phosphate-dependent | [50-203] | |
| | | transferase, major region, subdomain | | |
| Gene3D | G3DSA:3.40.640.10 | no description | description | 7.8e−57 |
| InterPro | IPR015424 | Pyridoxal phosphate-dependent | phosphate- | |
| | | transferase, | dependent | |
| superfamily | SSF53383 | PLP-dependent transferases | [2-203] | 6.2e−56 |

TABLE D2

| | | | Amino Acid | |
|---|---|---|---|---|
| | | | Coordinates in | |
| | | Aspartate/other | on SEQ ID NO: 6, | |
| Database | Accession number | aminotransferase | (Start-End) | e-value |
| InterPro | IPR000796 | Aspartate/other aminotransferase | | |
| FPrintScan | PR00799 | TRANSAMINASE | [234-253]; [265-279]; | 5.9E−68 |
| | | | [301-321]; [401-419]; | |
| | | | 427-445] | |
| HMMPanther | PTHR11879 | Asp_trans | [38-460] | 0.0 |
| InterPro | IPR004838 | Aminotransferases, class-I, | | |
| | | pyridoxal-phosphate-binding site | | |
| ProfileScan | PS00105 | AA_TRANSFER_CLASS_1 | [303-316] | 8.0E−5 |
| InterPro | IPR004839 | Aminotransferase, class I and II | | |
| HMMPfam | PF00155 | Aminotran_1_2 | [84-452] | 0.0 |
| InterPro | IPR015421 | Pyridoxal phosphate-dependent | | |
| | | transferase major region, | | |
| | | subdomain I | | |
| Gene3D | G3DSA:3.40.640.10 | PyrdxlP-dep_Trfase_major_sub1 | [103-375] | 3.8E−111 |
| InterPro | IPR015424 | Pyridoxal phosphate-dependent | | |
| | | transferase major region | | |
| superfamily | SSF53383 | PyrdxlP-dep_Trfase_major | [55-460] | 6.8E−121 |

TABLE D3

| | | | Amino Acid Coordinates |
|---|---|---|---|
| Database | Accession number | Aspartate/other aminotransferase | [Start-End] - Evalue |
| InterPro | IPR000796 | Aspartate/other aminotransferase | aminoransferase |
| FPrintScan | PR00799 | TRANSAMINASE | [179-198]; [210-224]; |
| | | | [246-266]; [278-303]; |
| | | | [346-364]; [372-390]; - |
| | | | 1.6e−70 |
| HMMPanther | PTHR11879 | ASPARTATE AMINOTRANSFERASE | [1-405] - 6.2e−259 |
| InterPro | IPR004838 | Aminotransferases, Class I pyridoxal- | |
| | | phosphate-binding site | |
| ScanRegExp | PS00105 | AA_TRANSFER_CLASS_1 | [248-261] - 0.00008 |
| InterPro | IPR004839 | Aminotransferase, class I and II | |
| HMMPfam | PF00155 | Aminotran_1_2 | [29-397] - 1.4e−140 |
| InterPro | IPR015421 | Pyridoxal phosphate-dependent | |
| | | transferase, major region subdomain I | |
| Gene3D | G3DSA:3.40.640.10 | no description | [48-320] - 1.7e−107 |
| InterPro | IPR015424 | Pyridoxal phosphate transferase major | |
| | | region | |
| superfamily | SSF53383 | PLP-dependent transferase | [1-405] - 1.3e−119 |

### 4.2. MYB91 Like Transcription Factor (MYB91)

[0547] The Integrated Resource of Protein Families, Domains and Sites (InterPro) database is an integrated interface for the commonly used signature databases for text- and sequence-based searches. The InterPro database combines these databases, which use different methodologies and varying degrees of biological information about well-characterized proteins to derive protein signatures. Collaborating databases include SWISS-PROT, PROSITE, TrEMBL, PRINTS, Propom and Pfam, Smart and TIGRFAMs. Interpro is hosted at the European Bioinformatics Institute in the United Kingdom.

[0548] The results of the InterPro scan of the polypeptide sequence as represented by SEQ ID NO: 221 are presented in Table D4.

TABLE D4
InterPro scan results of the polypeptide sequence as represented by SEQ ID NO: 221

| InterPro accession | Integrated database | Integrated database | Integrated database |
|---|---|---|---|
| number and name | Name | accession number | accession name |
| IPR001005 | SMART | SM00717 | SANT |
| SANT, DNA-binding domain | | | |
| IPR009057 homeodomain-like | SUPERFAMILY | SSF46689 | Homeodomain-like |
| IPR012287 Homeodomain-related | GENE3D | G3DSA:1.10.10.60 | |
| IPR014778 Myb, DNA-binding | PFAM | PF00249 | Myb_DNA-binding |
| IPR015495 Myb transcription factor | PANTHER | PTHR10641 | MYB-related |
| No IPR unintegrated | PANTHER | PTHR10641:SF24 | Assymetric leaves1 |
| | | | and Rough Sheath2 |
| No IPR unintegrated | PROFILE | PS51294 | HTH_MYB |

### 4.3. Gibberellic Acid-Stimulated Arabidopsis (GASA)

[0549] The Integrated Resource of Protein Families, Domains and Sites (InterPro) database is an integrated interface for the commonly used signature databases for text- and sequence-based searches. The InterPro database combines these databases, which use different methodologies and varying degrees of biological information about well-characterized proteins to derive protein signatures. Collaborating databases include SWISS-PROT, PROSITE, TrEMBL, PRINTS, Propom and Pfam, Smart and TIGRFAMs. Pfam is a large collection of multiple sequence alignments and hidden Markov models covering many common protein domains and families. Pfam is hosted at the Sanger Institute server in the United Kingdom. Interpro is hosted at the European Bioinformatics Institute in the United Kingdom.

[0550] The results of the InterPro scan of the polypeptide sequence as represented by SEQ ID NO: 2 are presented in Table D5.

TABLE D5
InterPro scan results (major accession numbers) of the polypeptide
sequence as represented by SEQ ID NO: 276.

| | | | Amino acid |
|---|---|---|---|
| | Accession | | coordinates on |
| Database | number | Accession name | SEQ ID NO 2 |
| InterPro | IPR003854 | Gibberellin regulated | |
| | | protein | |
| HMMPfam | PF02704 | GASA | 5-114 |

### 4.4. Auxin/Indoleacetic Acid Genes (AUX/IAA)

[0551] The presence of conserved protein domains in SEQ ID NO: 432 was determined by searching the pfam database. Pfam is a large collection of multiple sequence alignments and hidden Markov models covering many common protein domains and families. Pfam is hosted at the Sanger Institute server in the United Kingdom.

[0552] The results of the search of the Pfam with the query sequence as represented by SEQ ID NO: 432 are presented in Table D6.

TABLE D6
Pfam search results (major accession numbers) of the polypeptide sequence as
represented by SEQ ID NO: 432.

| | | | Amino acid | | | | | | |
|---|---|---|---|---|---|---|---|---|---|
| | | | coordinate | | | | | | |
| | | | of domain | | | | | | |
| | | | PF02309 in | | | | | | |
| | | Entry | SEQ ID NO: 2 | | HMM | | Bits | | Alignment |
| Pfam-A | Description | type | Start | End | From | To | score | E-value | mode |
| AUX_IAA | AUX/IAA | Family | 5 | 171 | 1 | 269 | 70.3 | 6.9e−18 | Is |
| | family | PF02309 | | | | | | | |

[0553] The Alignment mode use is the so called “Is”. Parameters used in the model are given in Table D7.

TABLE D7
HMM model
Is model: hmmbuild -F HMM_Is SEED
hmmcalibrate --cpu 1 --seed 0 HMM_Is

Is

| Parameter | Sequence | Domain |
|---|---|---|
| Gathering cut-off | −83 | −83 |
| Trusted cut-off | −82 | −82 |
| Noise cut-off | −83.5 | −83.5 |

### 4.5. IAA14 Polypeptides

[0554] The Integrated Resource of Protein Families, Domains and Sites (InterPro) database is an integrated interface for the commonly used signature databases for text- and sequence-based searches. The InterPro database combines these databases, which use different methodologies and varying degrees of biological information about well-characterized proteins to derive protein signatures. Collaborating databases include SWISS-PROT, PROSITE, TrEMBL, PRINTS, Propom and Pfam, Smart and TIGRFAMs. Pfam is a large collection of multiple sequence alignments and hidden Markov models covering many common protein domains and families. Pfam is hosted at the Sanger Institute server in the United Kingdom. Interpro is hosted at the European Bioinformatics Institute in the United Kingdom.

[0555] The results of the InterPro scan of the polypeptide sequence as represented by SEQ ID NO: 738 are presented in Table D8.

TABLE D8
InterPro scan results (major accession numbers) of the
polypeptide sequence as represented by SEQ ID NO: 738.

| | | | Amino acid |
|---|---|---|---|
| | Accession | Accession | coordinates on |
| Database | number | name | SEQ ID NO 738 |
| InterPro | IPR003311 | AUX/IAA protein | |
| HMMPfam | PF02309 | AUX_IAA | 1-220 |
| InterPro | IPR011525 | Aux/IAA-ARF- | |
| | | dimerisation | |
| ProfileScan | PS50962 | IAA_ARF | 111-211 |
| InterPro | NULL | NULL | |
| superfamily | SSF54277 | CAD & PB1 domains | 106-209 |

### Example 5

### Topology Prediction of the Polypeptide Sequences Useful in Performing the Methods of the Invention

### 5.1. Aspartate AminoTransferase (ASPAT)

[0556] TargetP 1.1 predicts the subcellular location of eukaryotic proteins. The location assignment is based on the predicted presence of any of the N-terminal pre-sequences: chloroplast transit peptide (cTP), mitochondrial targeting peptide (mTP) or secretory pathway signal peptide (SP). Scores on which the final prediction is based are not really probabilities, and they do not necessarily add to one. However, the location with the highest score is the most likely according to TargetP, and the relationship between the scores (the reliability class) may be an indication of how certain the prediction is. The reliability class (RC) ranges from 1 to 5, where 1 indicates the strongest prediction. TargetP is maintained at the server of the Technical University of Denmark.

[0557] For the sequences predicted to contain an N-terminal presequence a potential cleavage site can also be predicted.

[0558] A number of parameters were selected, such as organism group (non-plant or plant), cutoff sets (none, predefined set of cutoffs, or user-specified set of cutoffs), and the calculation of prediction of cleavage sites (yes or no).

[0559] The protein sequences representing the GRP are used to query TargetP 1.1. The “plant” organism group is selected, no cutoffs defined, and the predicted length of the transit peptide requested.

[0560] Many other algorithms can be used to perform such analyses, including:
[0561] ChloroP 1.1 hosted on the server of the Technical University of Denmark;
[0562] Protein Prowler Subcellular Localisation Predictor version 1.2 hosted on the server of the Institute for Molecular Bioscience, University of Queensland, Brisbane, Australia;
[0563] PENCE Proteome Analyst PA-GOSUB 2.5 hosted on the server of the University of Alberta, Edmonton, Alberta, Canada;
[0564] TMHMM, hosted on the server of the Technical University of Denmark

### 5.2. Gibberellic Acid-Stimulated Arabidopsis (GASA)

[0565] TargetP 1.1 predicts the subcellular location of eukaryotic proteins. The location assignment is based on the predicted presence of any of the N-terminal pre-sequences: chloroplast transit peptide (cTP), mitochondrial targeting peptide (mTP) or secretory pathway signal peptide (SP). Scores on which the final prediction is based are not really probabilities, and they do not necessarily add to one. However, the location with the highest score is the most likely according to TargetP, and the relationship between the scores (the reliability class) may be an indication of how certain the prediction is. The reliability class (RC) ranges from 1 to 5, where 1 indicates the strongest prediction. TargetP is maintained at the server of the Technical University of Denmark.

[0566] For the sequences predicted to contain an N-terminal presequence a potential cleavage site can also be predicted.

[0567] A number of parameters were selected, such as organism group (non-plant or plant), cutoff sets (none, predefined set of cutoffs, or user-specified set of cutoffs), and the calculation of prediction of cleavage sites (yes or no).

[0568] The results of TargetP 1.1 analysis of the polypeptide sequence as represented by SEQ ID NO: 221 are presented Table E1. The “plant” organism group has been selected, no cutoffs defined, and the predicted length of the transit peptide requested. The polypeptide sequence as represented by SEQ ID NO: 221 is predicted to be secreted, with a secretion signal sequence of 24 amino acids.

TABLE E1
TargetP 1.1 analysis of the polypeptide
sequence as represented by SEQ ID NO: 221

| | |
|---|---|
| Length (AA) | 114 |
| Chloroplastic transit peptide | 0.022 |
| Mitochondrial transit peptide | 0.022 |
| Secretory pathway signal peptide | 0.960 |
| Other subcellular targeting | 0.023 |
| Predicted Location | S |
| Reliability class | 1 |
| Predicted transit peptide length | 24 |

[0569] Many other algorithms can be used to perform such analyses, including:
[0570] ChloroP 1.1 hosted on the server of the Technical University of Denmark;
[0571] Protein Prowler Subcellular Localisation Predictor version 1.2 hosted on the server of the Institute for Molecular Bioscience, University of Queensland, Brisbane, Australia;
[0572] PENCE Proteome Analyst PA-GOSUB 2.5 hosted on the server of the University of Alberta, Edmonton, Alberta, Canada;
[0573] TMHMM, hosted on the server of the Technical University of Denmark
[0574] PSORT (URL: psort.org)
[0575] PLOC (Park and Kanehisa, Bioinformatics, 19, 1656-1663, 2003).

### 5.3. Auxin/Indoleacetic Acid Genes (AUX/IAA)

[0576] TargetP 1.1 predicts the subcellular location of eukaryotic proteins. The location assignment is based on the predicted presence of any of the N-terminal pre-sequences: chloroplast transit peptide (cTP), mitochondrial targeting peptide (mTP) or secretory pathway signal peptide (SP). Scores on which the final prediction is based are not really probabilities, and they do not necessarily add to one. However, the location with the highest score is the most likely according to TargetP, and the relationship between the scores (the reliability class) may be an indication of how certain the prediction is. The reliability class (RC) ranges from 1 to 5, where 1 indicates the strongest prediction. TargetP is maintained at the server of the Technical University of Denmark.

[0577] For the sequences predicted to contain an N-terminal presequence a potential cleavage site can also be predicted.

[0578] A number of parameters were selected, such as organism group (non-plant or plant), cutoff sets (none, predefined set of cutoffs, or user-specified set of cutoffs), and the calculation of prediction of cleavage sites (yes or no).

[0579] Many other algorithms can be used to perform such analyses, including:
[0580] ChloroP 1.1 hosted on the server of the Technical University of Denmark;
[0581] Protein Prowler Subcellular Localisation Predictor version 1.2 hosted on the server of the Institute for Molecular Bioscience, University of Queensland, Brisbane, Australia;
[0582] PENCE Proteome Analyst PA-GOSUB 2.5 hosted on the server of the University of Alberta, Edmonton, Alberta, Canada;
[0583] TMHMM, hosted on the server of the Technical University of Denmark
[0584] PSORT (URL: psort.org)
[0585] PLOC (Park and Kanehisa, Bioinformatics, 19, 1656-1663, 2003).
   5.4. IAA14 polypeptides

[0586] TargetP 1.1 predicts the subcellular location of eukaryotic proteins. The location assignment is based on the predicted presence of any of the N-terminal pre-sequences: chloroplast transit peptide (cTP), mitochondrial targeting peptide (mTP) or secretory pathway signal peptide (SP). Scores on which the final prediction is based are not really probabilities, and they do not necessarily add to one. However, the location with the highest score is the most likely according to TargetP, and the relationship between the scores (the reliability class) may be an indication of how certain the prediction is. The reliability class (RC) ranges from 1 to 5, where 1 indicates the strongest prediction. TargetP is maintained at the server of the Technical University of Denmark.

[0587] For the sequences predicted to contain an N-terminal presequence a potential cleavage site can also be predicted.

[0588] A number of parameters were selected, such as organism group (non-plant or plant), cutoff sets (none, predefined set of cutoffs, or user-specified set of cutoffs), and the calculation of prediction of cleavage sites (yes or no).

[0589] The results of TargetP 1.1 analysis of the polypeptide sequence as represented by SEQ ID NO: 738 are presented Table E2. The “plant” organism group has been selected, no cutoffs defined, and the predicted length of the transit peptide requested. The subcellular localization of the polypeptide sequence as represented by SEQ ID NO: 738 may be the cytoplasm or nucleus, no transit peptide is predicted.

TABLE E2
TargetP 1.1 analysis of the polypeptide sequence as
represented by SEQ ID NO: 738.

| Name | Len | cTP | mTP | SP | other | Loc | RC | TPlen |
|---|---|---|---|---|---|---|---|---|
| AtIAA14 | 228 | 0.116 | 0.087 | 0.047 | 0.879 | — | 2 | — |
| cutoff | | 0.000 | 0.000 | 0.000 | 0.000 | | | |

Abbreviations:
Len, Length;
cTP, Chloroplastic transit peptide;
mTP, Mitochondrial transit peptide,
SP, Secretory pathway signal peptide,
other, Other subcellular targeting,
Loc, Predicted Location;
RC, Reliability class;
TPlen, Predicted transit peptide length.

[0590] Many other algorithms can be used to perform such analyses, including:
[0591] ChloroP 1.1 hosted on the server of the Technical University of Denmark;
[0592] Protein Prowler Subcellular Localisation Predictor version 1.2 hosted on the server of the Institute for Molecular Bioscience, University of Queensland, Brisbane, Australia;
[0593] PENCE Proteome Analyst PA-GOSUB 2.5 hosted on the server of the University of Alberta, Edmonton, Alberta, Canada;
[0594] TMHMM, hosted on the server of the Technical University of Denmark
[0595] PSORT (URL: psort.org)
[0596] PLOC (Park and Kanehisa, Bioinformatics, 19, 1656-1663, 2003).

[0597] PSORT analysis predicts a nuclear localisation, which is in agreement with the data from the literature (Fukaki et al., 2002).

### Example 6

### Subcellular Localisation Prediction of the Polypeptide Sequences Useful in Performing the Methods of the Invention

### 6.1. MYB91 Like Transcription Factor (MYB91)

[0598] Experimental methods for protein localization range from immunolocalization to tagging of proteins using green fluorescent protein (GFP) or beta-glucuronidase (GUS). Such methods to identify subcellular compartmentalisation of GRF polypeptides are well known in the art.

[0599] A predicted nuclear localisation signal (NLS) can be found by multiple sequence alignment, followed by eye inspection, in the polypeptide sequences of Table A2. An NLS is one or more short sequences of positively charged lysines or arginines.

[0600] Computational prediction of protein localisation from sequence data was performed. Among algorithms well known to a person skilled in the art are available at the ExPASy Proteomics tools hosted by the Swiss Institute for Bioinformatics, for example, PSort, TargetP, ChloroP, LocTree, Predotar, LipoP, MITOPROT, PATS, PTS1, SignalP, TMHMM, TMpred, and others.

[0601] The PSort algorithm predicts a nuclear subcellular localization for a MYB91 polypeptide as represented by SEQ ID NO: 221, as highest probability (0.088). In addition, two putative NLS are predicted:

| | | | | |
|---|---|---|---|---|
| Found: | pos: | 81 | (3) | KK IAAEVPGRTA KRLGK |
| Found: | pos: | 273 | (3) | RR VELQLESERS CRRRE |

### Example 7

### Assay Related to the Polypeptide Sequences Useful in Performing the Methods of the Invention

### 7.1. MYB91 Like Transcription Factor (MYB91)

[0602] MYB91 polypeptides useful in the methods of the present invention (at least in their native form) typically, but not necessarily, have transcriptional regulatory activity and capacity to interact with other proteins. DNA-binding activity and protein-protein interactions may readily be determined in vitro or in vivo using techniques well known in the art (for example in Current Protocols in Molecular Biology, Volumes 1 and 2, Ausubel et al. (1994), Current Protocols). MYB91 polypeptides contain two Myb DNA-binding domain (InterPro accession IPR014778).

### 7.2. Gibberellic Acid-Stimulated Arabidopsis (GASA)

[0603] Transgenic plants expressing GASA polypeptides (at least in their native form) may have enhanced tolerance to heat stress. A thermotolerance assay is described by Ko et al. (2007): to examine the heat stress test response in seed germination, seeds are sown on water-saturated filter paper. They are left to imbibe at room temperature for 18 h, transferred to 50° C., and subjected to 3 h of heat treatment. Thereafter they are transferred to 22° C. Cotyledon emergence is determined after 5 days. Experiments are done in triplicate for each line (30 seeds each). To assess heat tolerance assay, seeds are germinated on normal MS (Murashige & Skoog salt mixture) medium. Seven-day-old seedlings are exposed to 50° C. for 2.5 h, and the surviving plants are scored 10 days after returning to normal growth conditions. Experiments were done in triplicate for each line (40 seeds each). Wild type plants are used as controls.

### 7.3. IAA14 Polypeptides

[0604] IAA14 is reported to interact with ARF7 and ARF19 in a yeast two-hybrid system (Fukaki et al., 2005): The cDNA fragments encoding the C-terminus of Arabidopsis ARF5 (amino acids 778-902), ARF7 (amino acids 1031-1164) and ARF19 (amino acids 952-1086) are amplified from a flower cDNA library using the following primer sets: 5′-agaattcAATAGTAAAGGCTCATC ATGGCAG-3′ and 5′-agtcgacGTTACATTTATGAAACAGAAGTCTTAAGATCG-3′ for ARF5, 5′-agtcgacaAGCTCAGACTCAGCGAATGCG-3′ and 5′-cagtcgacTCACCGGTTAAACGAA GTGGC-3′ for ARF7, and 5′-gagaattcAATCAGACTCAACGAATGCG-3′ and 5′-agtcgac CTATCTGTTGAAAGAAGCTGCAGC-3′ for ARF19.

[0605] The full-length IAA14 open reading frame is amplified using two primers, 5′-cgaattcAT GAACCTTAAGGAGACGGAGC-3′ and 5′-tgtcgacTCATGATCTGTTCTTGAACTTCTCC-3′. PCR products are subcloned into pCR-Blunt II TOPO (Invitrogen, Carlsbad, Calif., USA) and are sequenced before in-frame insertion into pAD-GAL4-2.1 or pBD-GAL4 Cam (Stratagene, Calif., USA) via EcoRI/SalI (IAA14, ARF5 and ARF19) or SalI (ARF7) sites. Constructs are next introduced into Saccharomyces cerevisiae Y190 cells, and transformants are subjected to assays for beta-galactosidase activity as previously described (Kaiser et al., Methods in Yeast Genetics: A Cold Spring Harbor Laboratory Course Manual. Cold Spring Harbor, N.Y.: Cold Spring Harbor Laboratory Press, 1994).

### Example 8

### Cloning of the Nucleic Acid Sequence Used in the Methods of the Invention

### 8.1. Aspartate AminoTransferase (ASPAT)

[0606] The nucleic acid sequence used in the methods of the invention was amplified by PCR using as template a custom-made cDNA library from either Arabidopsis thaliana seedlings or from Oryza sativa (in pCMV Sport 6.0; Invitrogen, Paisley, UK). PCR was performed using Hifi Taq DNA polymerase in standard conditions, using 200 ng of template in a 50 μl PCR mix. The cDNA library and primers used are given in Table F1.

TABLE F1

| | | | Primer |
|---|---|---|---|
| | | Primer | reverse |
| ORF in | | forward | (comple- |
| SEQ ID NO: | cDNA library | (sense) | mentary) |
| SEQ ID NO: 3 | Oryza sativa | Ggggacaagttt | Ggggaccactt |
| | | gtacaaaaaagc | tgtacaagaaa |
| | | aggcttaaacaa | gctgggtatgc |
| | | tggcgtcgtcgt | taccatcattc |
| | | cc | acttca |
| SEQ ID NO: 5 | Arabidopsis | Ggggacaagttt | Ggggaccactt |
| | thaliana | gtacaaaaaagc | tgtacaagaaa |
| | | aggcttaaacaa | gctgggtaaaa |
| | | tggattccgtct | atgtatggtcg |
| | | tctctaac | ctagtt |
| SEQ ID NO: 7 | Arabidopsis | Ggggacaagttt | Ggggaccactt |
| | thaliana | gtacaaaaaagc | tgtacaagaaa |
| | | aggcttaaacaa | gctgggttggt |
| | | tgaaaactactc | gttcagtttct |
| | | atttctcttc | cagac |
| SEQ ID NO: 9 | Arabidopsis | Ggggacaagttt | Ggggaccactt |
| | thaliana | gtacaaaaaagc | tgtacaagaaa |
| | | aggcttaaacaa | gctgggttgtc |
| | | tggcttctttaa | atctactgaga |
| | | tgttatct | tggaag |

[0607] Primers include the AttB sites for Gateway recombination. The amplified PCR fragment was purified also using standard methods. The first step of the Gateway procedure, the BP reaction, was then performed, during which the PCR fragment recombined in vivo with the pDONR201 plasmid to produce, according to the Gateway terminology, an “entry clone”, pASPAT. Plasmid pDONR201 was purchased from Invitrogen, as part of the Gateway® technology.

[0608] The entry clone comprising SEQ ID NO: 1 was then used in an LR reaction with a destination vector used for Oryza sativa transformation. This vector contained as functional elements within the T-DNA borders: a plant selectable marker; a screenable marker expression cassette; and a Gateway cassette intended for LR in vivo recombination with the nucleic acid sequence of interest already cloned in the entry clone. A rice GOS2 promoter (SEQ ID NO: 218) for constitutive specific expression was located upstream of this Gateway cassette.

[0609] After the LR recombination step, the resulting expression vector pGOS2::ASPAT (FIG. 3) was transformed into Agrobacterium strain LBA4044 according to methods well known in the art.

[0610] Similarly, expression vectors were generated comprising the following features (Table F2):

TABLE F2

| | | ASPT nucleic acid (Longest |
|---|---|---|
| Vector | Promoter | ORF in SEQ ID NO:) |
| ExprVect1 | pPR (SEQ ID NO: 219) | SEQ ID NO: 3 |
| ExprVect2 | pGOS2 (SEQ ID NO: 218) | SEQ ID NO: 5 |
| ExprVect3 | pPR (SEQ ID NO: 219) | SEQ ID NO: 5 |
| ExprVect4 | pGOS2 (SEQ ID NO: 218) | SEQ ID NO: 7 |
| ExprVect5 | pGOS2 (SEQ ID NO: 218) | SEQ ID NO: 9 |

### 8.2. MYB91 Like Transcription Factor (MYB91)

[0611] Unless otherwise stated, recombinant DNA techniques are performed according to standard protocols described in (Sambrook (2001) Molecular Cloning: a laboratory manual, 3rd Edition Cold Spring Harbor Laboratory Press, CSH, New York) or in Volumes 1 and 2 of Ausubel et al. (1994), Current Protocols in Molecular Biology, Current Protocols. Standard materials and methods for plant molecular work are described in Plant Molecular Biology Labfax (1993) by R. D. D. Croy, published by BIOS Scientific Publications Ltd (UK) and Blackwell Scientific Publications (UK).

[0612] The Populus trichocarpa nucleic acid sequence encoding a MYB91 polypeptide sequence as represented by SEQ ID NO: 221 was amplified by PCR using as template a cDNA bank constructed using RNA from tomato plants at different developmental stages. The following primers, which include the AttB sites for Gateway recombination, were used for PCR amplification:

1) prm11884 (SEQ ID NO: 271, sense):
5′-GGGGACAAGTTTGTACAAAAAAGCAGGCTTAAACAATGAAGGAGA
GGCAGCGT-3′
2) prm11885 (SEQ ID NO: 272, reverse,
complementary):
5′-GGGGACCACTTTGTACAAGAAAGCTGGGTGACCTGATACAGCTGG
ACGTA-3′

[0613] PCR was performed using Hifi Taq DNA polymerase in standard conditions. A PCR fragment of the expected length (including attB sites) was amplified and purified also using standard methods. The first step of the Gateway procedure, the BP reaction, was then performed, during which the PCR fragment recombined in vivo with the pDONR201 plasmid to produce, according to the Gateway terminology, an “entry clone”. Plasmid pDONR201 was purchased from Invitrogen, as part of the Gateway® technology.

[0614] The entry clone comprising SEQ ID NO: 220 was subsequently used in an LR reaction with a destination vector used for Oryza sativa transformation. This vector contained as functional elements within the T-DNA borders: a plant selectable marker; a screenable marker expression cassette; and a Gateway cassette intended for LR in vivo recombination with the nucleic acid sequence of interest already cloned in the entry clone. A rice GOS2 promoter (SEQ ID NO: 53) for constitutive expression was located upstream of this Gateway cassette.

[0615] After the LR recombination step, the resulting expression vector pGOS2::MYB91 (FIG. 6) for constitutive expression, was transformed into Agrobacterium strain LBA4044 according to methods well known in the art.

### 8.3. Gibberellic Acid-Stimulated Arabidopsis (GASA)

[0616] a) Cloning of Tomato GASA:

[0617] The tomato nucleic acid sequence used in the methods of the invention was amplified by PCR using as template a custom-made Solanum lycopersicum seedlings cDNA library (in pCMV Sport 6.0; Invitrogen, Paisley, UK). PCR was performed using Hifi Taq DNA polymerase in standard conditions, using 200 ng of template in a 50 μl PCR mix. The primers used were prm10623 (SEQ ID NO: 286; sense, start codon in bold): 5′-ggggacaagtttgtacaaaaaagc aggcttaaacaatggagaagacacttagctta-3′ and prm10624 (SEQ ID NO: 287; reverse, complementary): 5′-ggggaccactttgtacaagaaagctgggtatatatgattaagggcatttt-3′, which include the AttB sites for Gateway recombination. The amplified PCR fragment was purified also using standard methods. The first step of the Gateway procedure, the BP reaction, was then performed, during which the PCR fragment recombined in vivo with the pDONR201 plasmid to produce, according to the Gateway terminology, an “entry clone”, pGASA. Plasmid pDONR201 was purchased from Invitrogen, as part of the Gateway® technology.

[0618] The entry clone comprising SEQ ID NO: 275 was then used in an LR reaction with a destination vector used for Oryza sativa transformation. This vector contained as functional elements within the T-DNA borders: a plant selectable marker; a screenable marker expression cassette; and a Gateway cassette intended for LR in vivo recombination with the nucleic acid sequence of interest already cloned in the entry clone. A rice GOS2 promoter (SEQ ID NO: 290) for constitutive specific expression was located upstream of this Gateway cassette.

[0619] After the LR recombination step, the resulting expression vector pGOS2::GASA (FIG. 3) was transformed into Agrobacterium strain LBA4044 according to methods well known in the art.

[0620] b) Cloning of Poplar GASA

[0621] The poplar nucleic acid sequence used in the methods of the invention was amplified by PCR using as template a custom-made poplar seedlings cDNA library (in pCMV Sport 6.0; Invitrogen, Paisley, UK). PCR was performed using Hifi Taq DNA polymerase in standard conditions, using 200 ng of template in a 50 μl PCR mix. The primers used were prm10625 (SEQ ID NO: 288; sense, start codon in bold): 5′-gggacaagtttgtacaaaaaagcaggctt aacaatgaagaagctcttctttgct-3′ and prm10626 (SEQ ID NO: 289; reverse, complementary): 5′-ggggaccactttgtacaagaaagctgggtacatgcacatcttgactgtct-3′, which include the AttB sites for Gateway recombination. The amplified PCR fragment was purified also using standard methods, and the further cloning procedure was as described above, including use of the rice GOS2 promoter.

### 8.4. Auxin/Indoleacetic Acid Genes (AUX/IAA)

[0622] The nucleic acid sequence used in the methods of the invention was amplified by PCR using as template a custom-made Oryza sativa seedlings cDNA library (in pCMV Sport 6.0; Invitrogen, Paisley, UK). PCR was performed using Hifi Taq DNA polymerase in standard conditions, using 200 ng of template in a 50 μl PCR mix with a set of primer complementary to the first and last 20 nucleotides of SEQ ID NO: 431. The sequence of the forward primer used in the PCR can be represented by SEQ ID NO: 667 and the reverse primer by SEQ ID NO: 668. The amplified PCR fragment was purified also using standard methods. The first step of the Gateway procedure, the BP reaction, was then performed, during which the PCR fragment recombined in vivo with the pDONR201 plasmid to produce, according to the Gateway terminology, an “entry clone”, p AUX/IAA. Plasmid pDONR201 was purchased from Invitrogen, as part of the Gateway® technology.

[0623] The entry clone comprising SEQ ID NO: 431 was then used in an LR reaction with a destination vector used for Oryza sativa transformation. This vector contained as functional elements within the T-DNA borders: a plant selectable marker; a screenable marker expression cassette; and a Gateway cassette intended for LR in vivo recombination with the nucleic acid sequence of interest already cloned in the entry clone. A rice GOS2 promoter (SEQ ID NO: 669) for constitutive specific expression was located upstream of this Gateway cassette.

[0624] After the LR recombination step, the resulting expression vector pGOS2:: AUX/IAA (FIG. 12) was transformed into Agrobacterium strain LBA4044 according to methods well known in the art.

### 8.5. IAA14 Polypeptides

[0625] The nucleic acid sequence used in the methods of the invention was amplified by PCR using as template a custom-made Arabidopsis thaliana seedlings cDNA library (in pCMV Sport 6.0; Invitrogen, Paisley, UK). PCR was performed using Hifi Taq DNA polymerase in standard conditions, using 200 ng of template in a 50 μl PCR mix. The primers used were prm07273 (SEQ ID NO: 745; sense, start codon in bold): 5′-ggggacaagtttgtacaaaaaagcagg cttaaacaatgaaccttaaggagacggag-3′ and prm07274 (SEQ ID NO: 746; reverse, complementary): 5′-ggggaccactttgtacaagaaagctgggttcaatgcatattgtcctctttt-3′, which include the AttB sites for Gateway recombination. The amplified PCR fragment was purified also using standard methods. The first step of the Gateway procedure, the BP reaction, was then performed, during which the PCR fragment recombined in vivo with the pDONR201 plasmid to produce, according to the Gateway terminology, an “entry clone”, pIAA14-like. Plasmid pDONR201 was purchased from Invitrogen, as part of the Gateway® technology.

[0626] The entry clone comprising SEQ ID NO: 737 was then used in an LR reaction with a destination vector used for Oryza sativa transformation. This vector contained as functional elements within the T-DNA borders: a plant selectable marker; a screenable marker expression cassette; and a Gateway cassette intended for LR in vivo recombination with the nucleic acid sequence of interest already cloned in the entry clone. A rice HMGP promoter (SEQ ID NO: 747) for weak constitutive expression was located upstream of this Gateway cassette.

[0627] After the LR recombination step, the resulting expression vector pHMGP::IAA14-like (FIG. 16) was transformed into Agrobacterium strain LBA4044 according to methods well known in the art.

### Example 9

### Plant Transformation

### Rice Transformation

[0628] The Agrobacterium containing the expression vector was used to transform Oryza sativa plants. Mature dry seeds of the rice japonica cultivar Nipponbare were dehusked. Sterilization was carried out by incubating for one minute in 70% ethanol, followed by 30 minutes in 0.2% HgCl₂, followed by a 6 times 15 minutes wash with sterile distilled water. The sterile seeds were then germinated on a medium containing 2,4-D (callus induction medium). After incubation in the dark for four weeks, embryogenic, scutellum-derived calli were excised and propagated on the same medium. After two weeks, the calli were multiplied or propagated by subculture on the same medium for another 2 weeks. Embryogenic callus pieces were sub-cultured on fresh medium 3 days before co-cultivation (to boost cell division activity).

[0629] Agrobacterium strain LBA4404 containing the expression vector was used for co-cultivation. Agrobacterium was inoculated on AB medium with the appropriate antibiotics and cultured for 3 days at 28° C. The bacteria were then collected and suspended in liquid co-cultivation medium to a density (OD₆₀₀) of about 1. The suspension was then transferred to a Petri dish and the calli immersed in the suspension for 15 minutes. The callus tissues were then blotted dry on a filter paper and transferred to solidified, co-cultivation medium and incubated for 3 days in the dark at 25° C. Co-cultivated calli were grown on 2,4-D-containing medium for 4 weeks in the dark at 28° C. in the presence of a selection agent. During this period, rapidly growing resistant callus islands developed. After transfer of this material to a regeneration medium and incubation in the light, the embryogenic potential was released and shoots developed in the next four to five weeks. Shoots were excised from the calli and incubated for 2 to 3 weeks on an auxin-containing medium from which they were transferred to soil. Hardened shoots were grown under high humidity and short days in a greenhouse.

[0630] Approximately 35 independent T0 rice transformants were generated for one construct. The primary transformants were transferred from a tissue culture chamber to a greenhouse. After a quantitative PCR analysis to verify copy number of the T-DNA insert, only single copy transgenic plants that exhibit tolerance to the selection agent were kept for harvest of T1 seed. Seeds were then harvested three to five months after transplanting. The method yielded single locus transformants at a rate of over 50% (Aldemita and Hodges1996, Chan et al. 1993, Hiei et al. 1994).

### Corn Transformation

[0631] Transformation of maize (Zea mays) is performed with a modification of the method described by Ishida et al. (1996) Nature Biotech 14(6): 745-50. Transformation is genotype-dependent in corn and only specific genotypes are amenable to transformation and regeneration. The inbred line A188 (University of Minnesota) or hybrids with A188 as a parent are good sources of donor material for transformation, but other genotypes can be used successfully as well. Ears are harvested from corn plant approximately 11 days after pollination (DAP) when the length of the immature embryo is about 1 to 1.2 mm. Immature embryos are cocultivated with Agrobacterium tumefaciens containing the expression vector, and transgenic plants are recovered through organogenesis. Excised embryos are grown on callus induction medium, then maize regeneration medium, containing the selection agent (for example imidazolinone but various selection markers can be used). The Petri plates are incubated in the light at 25° C. for 2-3 weeks, or until shoots develop. The green shoots are transferred from each embryo to maize rooting medium and incubated at 25° C. for 2-3 weeks, until roots develop. The rooted shoots are transplanted to soil in the greenhouse. T1 seeds are produced from plants that exhibit tolerance to the selection agent and that contain a single copy of the T-DNA insert.

### Wheat Transformation

[0632] Transformation of wheat is performed with the method described by Ishida et al. (1996) Nature Biotech 14(6): 745-50. The cultivar Bobwhite (available from CIMMYT, Mexico) is commonly used in transformation. Immature embryos are co-cultivated with Agrobacterium tumefaciens containing the expression vector, and transgenic plants are recovered through organogenesis. After incubation with Agrobacterium, the embryos are grown in vitro on callus induction medium, then regeneration medium, containing the selection agent (for example imidazolinone but various selection markers can be used). The Petri plates are incubated in the light at 25° C. for 2-3 weeks, or until shoots develop. The green shoots are transferred from each embryo to rooting medium and incubated at 25° C. for 2-3 weeks, until roots develop. The rooted shoots are transplanted to soil in the greenhouse. T1 seeds are produced from plants that exhibit tolerance to the selection agent and that contain a single copy of the T-DNA insert.

### Soybean Transformation

[0633] Soybean is transformed according to a modification of the method described in the Texas A&M patent U.S. Pat. No. 5,164,310. Several commercial soybean varieties are amenable to transformation by this method. The cultivar Jack (available from the Illinois Seed foundation) is commonly used for transformation. Soybean seeds are sterilised for in vitro sowing. The hypocotyl, the radicle and one cotyledon are excised from seven-day old young seedlings. The epicotyl and the remaining cotyledon are further grown to develop axillary nodes. These axillary nodes are excised and incubated with Agrobacterium tumefaciens containing the expression vector. After the cocultivation treatment, the explants are washed and transferred to selection media. Regenerated shoots are excised and placed on a shoot elongation medium. Shoots no longer than 1 cm are placed on rooting medium until roots develop. The rooted shoots are transplanted to soil in the greenhouse. T1 seeds are produced from plants that exhibit tolerance to the selection agent and that contain a single copy of the T-DNA insert.

### Rapeseed/Canola Transformation

[0634] Cotyledonary petioles and hypocotyls of 5-6 day old young seedling are used as explants for tissue culture and transformed according to Babic et al. (1998, Plant Cell Rep 17: 183-188). The commercial cultivar Westar (Agriculture Canada) is the standard variety used for transformation, but other varieties can also be used. Canola seeds are surface-sterilized for in vitro sowing. The cotyledon petiole explants with the cotyledon attached are excised from the in vitro seedlings, and inoculated with Agrobacterium (containing the expression vector) by dipping the cut end of the petiole explant into the bacterial suspension. The explants are then cultured for 2 days on MSBAP-3 medium containing 3 mg/l BAP, 3% sucrose, 0.7% Phytagar at 23° C., 16 hr light. After two days of co-cultivation with Agrobacterium, the petiole explants are transferred to MSBAP-3 medium containing 3 mg/l BAP, cefotaxime, carbenicillin, or timentin (300 mg/l) for 7 days, and then cultured on MSBAP-3 medium with cefotaxime, carbenicillin, or timentin and selection agent until shoot regeneration. When the shoots are 5-10 mm in length, they are cut and transferred to shoot elongation medium (MSBAP-0.5, containing 0.5 mg/l BAP). Shoots of about 2 cm in length are transferred to the rooting medium (MS0) for root induction. The rooted shoots are transplanted to soil in the greenhouse. T1 seeds are produced from plants that exhibit tolerance to the selection agent and that contain a single copy of the T-DNA insert.

### Alfalfa Transformation

[0635] A regenerating clone of alfalfa (Medicago sativa) is transformed using the method of (McKersie et al., 1999 Plant Physiol 119: 839-847). Regeneration and transformation of alfalfa is genotype dependent and therefore a regenerating plant is required. Methods to obtain regenerating plants have been described. For example, these can be selected from the cultivar Rangelander (Agriculture Canada) or any other commercial alfalfa variety as described by Brown DCW and A Atanassov (1985. Plant Cell Tissue Organ Culture 4: 111-112). Alternatively, the RA3 variety (University of Wisconsin) has been selected for use in tissue culture (Walker et al., 1978 Am J Bot 65:654-659). Petiole explants are cocultivated with an overnight culture of Agrobacterium tumefaciens C58C1 pMP90 (McKersie et al., 1999 Plant Physiol 119: 839-847) or LBA4404 containing the expression vector. The explants are cocultivated for 3 d in the dark on SH induction medium containing 288 mg/L Pro, 53 mg/L thioproline, 4.35 g/L K2SO4, and 100 μm acetosyringinone. The explants are washed in half-strength Murashige-Skoog medium (Murashige and Skoog, 1962) and plated on the same SH induction medium without acetosyringinone but with a suitable selection agent and suitable antibiotic to inhibit Agrobacterium growth. After several weeks, somatic embryos are transferred to BOi2Y development medium containing no growth regulators, no antibiotics, and 50 g/L sucrose. Somatic embryos are subsequently germinated on half-strength Murashige-Skoog medium. Rooted seedlings were transplanted into pots and grown in a greenhouse. T1 seeds are produced from plants that exhibit tolerance to the selection agent and that contain a single copy of the T-DNA insert.

### Cotton Transformation

[0636] Cotton is transformed using Agrobacterium tumefaciens according to the method described in U.S. Pat. No. 5,159,135. Cotton seeds are surface sterilised in 3% sodium hypochlorite solution during 20 minutes and washed in distilled water with 500 μg/ml cefotaxime. The seeds are then transferred to SH-medium with 50 μg/ml benomyl for germination. Hypocotyls of 4 to 6 days old seedlings are removed, cut into 0.5 cm pieces and are placed on 0.8% agar. An Agrobacterium suspension (approx. 108 cells per ml, diluted from an overnight culture transformed with the gene of interest and suitable selection markers) is used for inoculation of the hypocotyl explants. After 3 days at room temperature and lighting, the tissues are transferred to a solid medium (1.6 g/l Gelrite) with Murashige and Skoog salts with B5 vitamins (Gamborg et al., Exp. Cell Res. 50:151-158 (1968)), 0.1 mg/l 2,4-D, 0.1 mg/l 6-furfurylaminopurine and 750 μg/ml MgCL2, and with 50 to 100 μg/ml cefotaxime and 400-500 μg/ml carbenicillin to kill residual bacteria. Individual cell lines are isolated after two to three months (with subcultures every four to six weeks) and are further cultivated on selective medium for tissue amplification (30° C., 16 hr photoperiod). Transformed tissues are subsequently further cultivated on non-selective medium during 2 to 3 months to give rise to somatic embryos. Healthy looking embryos of at least 4 mm length are transferred to tubes with SH medium in fine vermiculite, supplemented with 0.1 mg/l indole acetic acid, 6 furfurylaminopurine and gibberellic acid. The embryos are cultivated at 30° C. with a photoperiod of 16 hrs, and plantlets at the 2 to 3 leaf stage are transferred to pots with vermiculite and nutrients. The plants are hardened and subsequently moved to the greenhouse for further cultivation.

### Example 10

### Phenotypic Evaluation Procedure

### 10.1 Evaluation Setup

[0637] Approximately 35 independent T0 rice transformants were generated. The primary transformants were transferred from a tissue culture chamber to a greenhouse for growing and harvest of T1 seed. Events, of which the T1 progeny segregated 3:1 for presence/absence of the transgene, were retained. For each of these events, approximately 10 T1 seedlings containing the transgene (hetero- and homo-zygotes) and approximately 10 T1 seedlings lacking the transgene (nullizygotes) were selected by monitoring visual marker expression. The transgenic plants and the corresponding nullizygotes were grown side-by-side at random positions. Greenhouse conditions were of shorts days (12 hours light), 28° C. in the light and 22° C. in the dark, and a relative humidity of 70%. Plants grown under non-stress conditions were watered at regular intervals to ensure that water and nutrients were not limiting and to satisfy plant needs to complete growth and development.

[0638] T1 events were further evaluated in the T2 generation following the same evaluation procedure as for the T1 generation but with more individuals per event. From the stage of sowing until the stage of maturity the plants were passed several times through a digital imaging cabinet. At each time point digital images (2048×1536 pixels, 16 million colours) were taken of each plant from at least 6 different angles.

### Drought Screen

[0639] Plants from T2 seeds are grown in potting soil under normal conditions until they approached the heading stage. They are then transferred to a “dry” section where irrigation is withheld. Humidity probes are inserted in randomly chosen pots to monitor the soil water content (SWC). When SWC goes below certain thresholds, the plants are automatically re-watered continuously until a normal level is reached again. The plants are then re-transferred again to normal conditions. The rest of the cultivation (plant maturation, seed harvest) is the same as for plants not grown under abiotic stress conditions. Growth and yield parameters are recorded as detailed for growth under normal conditions.

### Nitrogen Use Efficiency Screen

[0640] Rice plants from T2 seeds are grown in potting soil under normal conditions except for the nutrient solution. The pots are watered from transplantation to maturation with a specific nutrient solution containing reduced N nitrogen (N) content, usually between 7 to 8 times less. The rest of the cultivation (plant maturation, seed harvest) is the same as for plants not grown under abiotic stress. Growth and yield parameters are recorded as detailed for growth under normal conditions.

### Salt Stress Screen

[0641] Plants are grown on a substrate made of coco fibers and argex (3 to 1 ratio). A normal nutrient solution is used during the first two weeks after transplanting the plantlets in the greenhouse. After the first two weeks, 25 mM of salt (NaCl) is added to the nutrient solution, until the plants are harvested. Seed-related parameters are then measured.

### 10.2 Statistical Analysis: F Test

[0642] A two factor ANOVA (analysis of variants) was used as a statistical model for the overall evaluation of plant phenotypic characteristics. An F test was carried out on all the parameters measured of all the plants of all the events transformed with the gene of the present invention.

[0643] The F test was carried out to check for an effect of the gene over all the transformation events and to verify for an overall effect of the gene, also known as a global gene effect. The threshold for significance for a true global gene effect was set at a 5% probability level for the F test. A significant F test value points to a gene effect, meaning that it is not only the mere presence or position of the gene that is causing the differences in phenotype.

[0644] Because two experiments with overlapping events were carried out, a combined analysis was performed. This is useful to check consistency of the effects over the two experiments, and if this is the case, to accumulate evidence from both experiments in order to increase confidence in the conclusion. The method used was a mixed-model approach that takes into account the multilevel structure of the data (i.e. experiment—event—segregants). P values were obtained by comparing likelihood ratio test to chi square distributions.

### 10.3 Parameters Measured

### Biomass-Related Parameter Measurement

[0645] From the stage of sowing until the stage of maturity the plants were passed several times through a digital imaging cabinet. At each time point digital images (2048×1536 pixels, 16 million colours) were taken of each plant from at least 6 different angles.

[0646] The plant aboveground area (or leafy biomass) was determined by counting the total number of pixels on the digital images from aboveground plant parts discriminated from the background. This value was averaged for the pictures taken on the same time point from the different angles and was converted to a physical surface value expressed in square mm by calibration. Experiments show that the aboveground plant area measured this way correlates with the biomass of plant parts above ground. The above ground area is the area measured at the time point at which the plant had reached its maximal leafy biomass. The early vigour is the plant (seedling) aboveground area three weeks post-germination. Increase in root biomass is expressed as an increase in total root biomass (measured as maximum biomass of roots observed during the lifespan of a plant); or as an increase in the root/shoot index (measured as the ratio between root mass and shoot mass in the period of active growth of root and shoot).

[0647] Early vigour was determined by counting the total number of pixels from aboveground plant parts discriminated from the background. This value was averaged for the pictures taken on the same time point from different angles and was converted to a physical surface value expressed in square mm by calibration. The results described below are for plants three weeks post-germination.

### Seed-Related Parameter Measurements

[0648] The mature primary panicles were harvested, counted, bagged, barcode-labelled and then dried for three days in an oven at 37° C. The panicles were then threshed and all the seeds were collected and counted. The filled husks were separated from the empty ones using an air-blowing device. The empty husks were discarded and the remaining fraction was counted again. The filled husks were weighed on an analytical balance. The number of filled seeds was determined by counting the number of filled husks that remained after the separation step. The total seed yield was measured by weighing all filled husks harvested from a plant. Total seed number per plant was measured by counting the number of husks harvested from a plant. Thousand Kernel Weight (TKW) is extrapolated from the number of filled seeds counted and their total weight. The Harvest Index (HI) in the present invention is defined as the ratio between the total seed yield and the above ground area (mm²), multiplied by a factor 10⁶. The total number of flowers per panicle as defined in the present invention is the ratio between the total number of seeds and the number of mature primary panicles. The seed fill rate as defined in the present invention is the proportion (expressed as a %) of the number of filled seeds over the total number of seeds (or florets).

### Examples 11

### Results of the Phenotypic Evaluation of the Transgenic Plants

### 11.1. Aspartate AminoTransferase (ASPAT)

[0649] The results of the evaluation of transgenic rice plants in the T2 generation and expressing a nucleic acid comprising the longest Open Reading Frame in SEQ ID NO: 3 under the control of the rice GOS2 promoter in non-stress conditions are presented below (Table G1). See previous Examples for details on the generations of the transgenic plants. An increase of at least 5% was observed for aboveground biomass (AreaMax), emergence, seed yield (totalwgseeds), number of filled seeds (nrfilledseed), fill rate (fillrate), and plant height (HeightMax) (Table G1).

TABLE G1
Phenotype transgenic plants transformed with pGOS2::ASAPT.

| | % increase in transgenic plants |
|---|---|
| Parameter | versus control plants |
| AreaMax | 7.4 |
| totalwgseeds | 11.8 |
| nrfilledseed | 9.3 |
| fillrate | 5.0 |
| HeightMax | 5.0 |

[0650] The results of the evaluation of transgenic rice plants in the T1 generation and expressing a nucleic acid comprising the longest Open Reading Frame in SEQ ID NO: 5 under the control of the rice GOS2 promoter in non-stress conditions are presented below (Table G2). See previous Examples for details on the generations of the transgenic plants. An increase of at least 5% was observed for plant height (HeightMax).

TABLE G2
Phenotype transgenic plants transformed with ExprVect2.

| | % increase in transgenic plants |
|---|---|
| Parameter | versus control plants |
| Plant heigth | 5.2 |

[0651] The results of the evaluation of transgenic rice plants in the T1 generation and expressing a nucleic acid comprising the longest Open Reading Frame in SEQ ID NO: 5 under the control of the rice PR promoter in non-stress conditions are presented below (Table G3). See previous Examples for details on the generations of the transgenic plants. An increase of at least 5% was observed for aboveground biomass (AreaMax), emergence vigour (EmerVigor), seed yield (totalwgseeds), number of filled seeds (nrfilledseed), number of flowers per panicle (flowerperpan), number of first panicle (firstpan), total number of seeds (nrtotalseed) and plant height (HeightMax).

TABLE G3
Phenotype transgenic plants transformed
with the expression vector ExprVect3.

| | % increase in transgenic plants |
|---|---|
| Parameter | versus control plants |
| AreaMax | 29.3 |
| EmerVigor | 49.8 |
| totalwgseeds | 31.2 |
| nrfilledseed | 32.0 |
| flowerperpan | 9.5 |
| firstpan | 15.8 |
| nrtotalseed | 26.8 |
| HeightMax | 11.6 |

[0652] The results of the evaluation of transgenic rice plants in the T2 generation and expressing a nucleic acid comprising the longest Open Reading Frame in SEQ ID NO: 5 under the control of the rice PR promoter in non-stress conditions are presented below (Table G4). See previous Examples for details on the generations of the transgenic plants. An increase of at least 5% was observed for aboveground biomass (AreaMax), emergence vigour (EmerVigor), total seed yield (totalwgseeds), number of filled seeds (nrfilledseed), nr of flowers per panicle (flowerperpan), number of first panicle (firstpan), total number of seeds (nrtotalseed) and plant height (HeightMax).

TABLE G4
Phenotype transgenic plants transformed
with the expression vector ExprVect3.

| | % increase in transgenic plants |
|---|---|
| Parameter | versus control plants |
| AreaMax | 9.7 |
| EmerVigor | 17.8 |
| totalwgseeds | 24.4 |
| nrfilledseed | 23.3 |
| fillrate | 8.4 |
| harvestindex | 14.7 |
| firstpan | 10.8 |
| nrtotalseed | 14.9 |
| HeightMax | 5.3 |

[0653] The results of the evaluation of transgenic rice plants in the T1 generation and expressing a nucleic acid comprising the longest Open Reading Frame in SEQ ID NO: 3 under the control of the rice PR promoter in non-stress conditions are presented below (Table G5). See previous Examples for details on the generations of the transgenic plants. An increase of at least 5% was observed for seed yield (totalwgseeds), number of filled seeds (nrfilledseed), harvest index (harvestindex), and seed filling rate (fillrate).

TABLE G5
Phenotype transgenic plants transformed
with the expression vector ExprVect1.

| | % increase in transgenic plants |
|---|---|
| Parameter | versus control plants |
| totalwgseeds | 23.0 |
| nrfilledseed | 20.1 |
| fillrate | 9.9 |
| harvestindex | 13.8 |

[0654] The results of the evaluation of transgenic rice plants in the T1 generation and expressing a nucleic acid comprising the longest Open Reading Frame in SEQ ID NO: 9 under the control of the rice GOS2 promoter in non-stress conditions are presented below (Table G6). See previous Examples for details on the generations of the transgenic plants. An increase of at least 5% was observed for filled seeds (nrfilledseed) and harvest index (harvestindex).

TABLE G6
Phenotype transgenic plants transformed
with the expression vector ExprVect5.

| | % increase in transgenic plants |
|---|---|
| Parameter | versus control plants |
| fillrate | 6.6 |
| harvestindex | 6.0 |

[0655] The results of the evaluation of transgenic rice plants under non-stress conditions are presented below. An increase of at least 5% was observed for fill rate and harvest index.

### 11.2. MYB91 Like Transcription Factor (MYB91)

[0656] The results of the evaluation of T1 generation transgenic rice plants expressing the nucleic acid sequence encoding a MYB91 polypeptide as represented by SEQ ID NO: 221, under the control of a constitutive promoter, and grown under normal growth conditions, are presented below.

[0657] There was a significant increase in plant height, in harvest index (HI), and in Thousand Kernel Weight (TKW).

TABLE G7
Results of the evaluation of T1 generation transgenic rice
plants expressing the nucleic acid sequence encoding a MYB91
polypeptide as represented by SEQ ID NO: 221, under the
control of a promoter for constitutive expression.

| | 0verall average % increase |
|---|---|
| Trait | in 4 events in the T2 generation |
| Plant height | 3% |
| Harvest index | 8% |
| Thousand kernel weight | 6% |

### 11.3. Gibberellic Acid-Stimulated Arabidopsis (GASA)

[0658] The results of the evaluation of transgenic rice plants expressing the tomato GASA nucleic acid under control of a medium strength constitutive promoter under non-stress conditions are presented below in Table G8.

TABLE G8
overall increase (%) for yield parameters

| parameter | 1^{st} evaluation | 2^{nd} evaluation |
|---|---|---|
| Time to flower | 2.1 | 3.5 |
| Fill rate | 10.4 | 8.3 |
| Flowers per panicle | 4.8 | 14.7 |

[0659] The flowering time was reduced compared to control plants, and there was an increase of more than 5% for fill rate and for the number of flowers per panicle.

[0660] The results of the evaluation of transgenic rice plants expressing the poplar GASA nucleic acid under control of a medium strength constitutive promoter under non-stress conditions are presented below in Table G9.

TABLE G9
overall increase (%) for yield parameters

| parameter | 1^{st} evaluation | 2^{nd} evaluation |
|---|---|---|
| Total weight of seeds | 13.3 | 13.7 |
| Harvest index | 18.8 | 22.2 |
| Thousand Kernel weight | 4.2 | 2.9 |

### 11.4. Auxin/Indoleacetic Acid Genes (AUX/IAA)

[0661] The results of the evaluation of transgenic rice plants in the T2 generation and expressing a nucleic acid comprising the longest Open Reading Frame in SEQ ID NO: 431 under non-stress conditions are presented below. See previous Examples for details on the generations of the transgenic plants.

[0662] The results of the evaluation of transgenic rice plants under non-stress conditions are presented below (Table G10). An increase of at least 5% was observed for the number of filled seed per plant (nrfilledseed), harvest index (harvestindex) and seed yield (totalwgseeds.

TABLE G10

| | Percentage increase in transgenic |
|---|---|
| Yield-related trait | plants compared to control plants |
| totalwgseeds | 12.0 |
| harvestindex | 8.3 |
| nrfilledseed | 11.2 |

### 11.5. IAA14 Polypeptides

[0663] The results of the evaluation of T2 transgenic rice plants expressing the IAA14-like nucleic acid of SEQ ID NO: 738 under non-stress conditions are presented below (Table G11).

TABLE G11
Overall yield increase (in %) of transgenic
plants expressing SEQ ID NO: 738

| Parameter | Overall increase |
|---|---|
| totalwgseeds | 19.2 |
| nrfilledseed | 18.6 |
| fillrate | 18.8 |
| harvestindex | 21.1 |
| HeightMax | 5.5 |
| GravityYMax | 6.6 |

[0664] An increase was found for total weight of seeds, the number of filled seeds, for the fill rate (number of filled seeds divided by the total number of seeds and multiplied by 100), harvest index, height of the plant and the gravity center (indication of branching of plants). For each of the parameters listed in Table G11, the p-value was p<0.05.

The application's sequence listing, which the Patent Office published only in electronic form, follows.

SEQUENCE LISTING (817 sequences)

SEQ ID NO: 1 - DNA, 1888 bp, Oryza sativa
acggcaccaccatcgaacaaagaatagcgcgcacgcattcgcctcgacgccgcatactcgcgtccacgagccccgcgagaaacagctatccacgtcatccgcggcggccgcccgccgttttcccttttccaggcgcgactcggcggccgcacccggttgcgcacgccgctccccccccccccccccccccacgccacgctcccccgcctcgtttcccccgcgcggccgcgccagaaaggggagaaacgcttcacgcgcgcggcgcaccctagcttgggccacgatgccatccgctaacgtgcgcggggcgcagcctagcgccgaccgcaggttaagtacgctggtgcgccacctactgccttcctccgcacgaacagcaaccaccaccagcacctcctcctccgccgccgacgccgactcctccctccaagctttccccaccatggcgtcgtcgtccgtcttcgctggcctcgcgcaggcgccggaggaccccatcctcggggtgacggtcgcgtacaacaaggatcccagccccgtgaaggtcaatctcggcgtcggcgcctaccggaccgaggaagggaagcccctggtgctgaatgtggtcaggcgcgctgagcagatgctgatcaacaacccgtcacgtgttaaggagtatttgccgatcactggactggccgatttcaataagctgagtgctaagcttatttttggtgctgacagtcctgccattcaagagaatagggtggctacagttcagtgcttgtcaggaactggttctttaagggtgggaggtgaatttcttgcaaggcattatcatgaacgcactatatacatcccacagccaacctgggggaatcaccccaaagtgttcactttagctggcctgactgttaggagttaccgctactatgatcctgcaacccgtggactggatttccaagggctgttagaagatctcggttcagctccttcaggtgcaattgtactgcttcatgcttgtgcccacaaccctactggagtagacccaactttggaccagtgggaacagatcaggcagttgatgagatcaaaagcattgctgccattctttgatagcgcttatcagggatttgcaagtggaagtcttgaccaagatgctcaatcagtgcgcatgtttgttgctgatggtggtgaattgctcatggctcagagctacgctaagaacatgggattgtatggagagcgtgtcggtgctttaagcatagtttgtggaagtgctgatgtagctgtcagggttgaaagtcaacttaagcttgtaattaggcctatgtattcaaaccctcctattcatggtgcatctatcgtggctaccatacttaaggacagtgcaatgttcaatgaatggactgtggagctgaagggcatggctgataggattattagcatgaggcaacagctttttgatgctctgaaaacgagagaaactcctggagactggagtcacatcattaagcagatcggaatgttcactttcactgggctcaacagtgatcaagtggctttcatgaggcaggaataccacatttacatgacatctgatgggaggatcagtatggctggtttgagcgggaggaccattccgcatcttgcagatgcaatccatgccgcagtcacaaaactgaagtgaatgatggtagcatagcagctccctccaagaataacatcttaaaaccatccgcagcagtgttctgaggattcagacagtgatgtttgctggctgagcacatcctggaagtttccttgtaatagactcgtgtgacttgcttttgggagcagttttgtaccagtggattcagaaaaagtggtgatttcgaatcacctaataagctccatcggtgatgcttttacc

SEQ ID NO: 2 - protein, 460 aa, Oryza sativa
MPSANVRGAQPSADRRLSTLVRHLLPSSARTATTTSTSSSAADADSSLQAFPTMASSSVFAGLAQAPEDPILGVTVAYNKDPSPVKVNLGVGAYRTEEGKPLVLNVVRRAEQMLINNPSRVKEYLPITGLADFNKLSAKLIFGADSPAIQENRVATVQCLSGTGSLRVGGEFLARHYHERTIYIPQPTWGNHPKVFTLAGLTVRSYRYYDPATRGLDFQGLLEDLGSAPSGAIVLLHACAHNPTGVDPTLDQWEQIRQLMRSKALLPFFDSAYQGFASGSLDQDAQSVRMFVADGGELLMAQSYAKNMGLYGERVGALSIVCGSADVAVRVESQLKLVIRPMYSNPPIHGASIVATILKDSAMFNEWTVELKGMADRIISMRQQLFDALKTRETPGDWSHIIKQIGMFTFTGLNSDQVAFMRQEYHIYMTSDGRISMAGLSGRTIPHLADAIHAAVTKLK

SEQ ID NO: 3 - DNA, 1334 bp, Oryza sativa
tgactgttcgttgcacaaattgatgagcaatgcttttttataatgccaactttgtacaaaaaagcaggcttaaacaatggcgtcgtcgtccgtcttcgctggcctcgcgcaggcgccggaggaccccatcctcggggtgacggtcgcgtacaacaaggatcccagccccgtgaaggtcaatctcggcgtcggcgcctaccggaccgaggaagggaagcccctggtgctgaatgtggtcaggcgcgctgagcagatgctgatcaacaacccgtcacgtgttaaggagtatttgccgatcactggactggccgatttcaataagctgagtgctaagcttatttttggtgctgacagtcctgccattcaagagaatagggtggctacagttcagtgcttgtcaggaactggttctttaagggtgggaggtgaatttcttgcaaggcattatcatgaacgcactatatacatcccacagccaacctgggggaatcaccccaaagtgttcactttagctggcctgactgttaggagttaccgctactatgatcctgcaacccgtggactggatttccaagggctgttagaagatctcggttcagctccttcaggtgcaattgtactgcttcatgcttgtgcccacaaccctactggagtagacccaactttggaccagtgggaacagatcaggtagttgatgagatcaaaagcattgctgccattctttgatagcgcttatcagggatttgcaagtggaagccttgaccaagatgctcaatcagtgcgcatgtttgttgctgatggtggtgaattgctcatggctcagagctacgctaagaacatgggattgtatggagagcgtgtcggtgctttaagcatagtttgtggaagtgctgatgtagctgtcagggttgaaagtcaacttaagcttgtaattaggcctatgtattcaaaccctcctattcatggtgcatctatcgtggctaccatacttaaggacagtgcaatgttcaatgaatggactgtggagctgaagggcatggctgataggattattagcatgaggcaacagctttttgatgctctgaaaacgagagaaactcctggagactggagtcacatcattaagcagatcggaatgttcactttcactgggctcaacagtgatcaagtggctttcatgaggcaggaataccacatttacatgacatctgatgggaggatcagtatggctggtttgagcgggaggaccattccgcatcttgcagatgcaatccatgccgcagtcacaaaactgaagtgaatgatggtagcatacccagctttcttgtacaaag

SEQ ID NO: 4 - protein, 204 aa, Oryza sativa
MASSSVFAGLAQAPEDPILGVTVAYNKDPSPVKVNLGVGAYRTEEGKPLVLNVVRRAEQMLINNPSRVKEYLPITGLADFNKLSAKLIFGADSPAIQENRVATVQCLSGTGSLRVGGEFLARHYHERTIYIPQPTWGNHPKVFTLAGLTVRSYRYYDPATRGLDFQGLLEDLGSAPSGAIVLLHACAHNPTGVDPTLDQWEQIR

SEQ ID NO: 5 - DNA, 1218 bp, Arabidsopsis thaliana
atggattccgtcttctctaacgttgctcgtgctcccgaagatcctattctcggtgtaactgttgcttacaacaatgatcctagtcctgttaagatcaatttgggtgtcggtgcctaccgaactgaggaagggaagcctcttgttcttgatgtggtgcgtaaggcagagcaacagctagtgaacgatccgtctcgggtcaaggaatacattcccattgttggtatttccgattttaacaagttaagcgccaagctcatcttaggtgctgacagtcctgcgattacagaaagtagagttactacagtccagtgcttgtctggtactggttcgttgagagttggggctgagtttctcaaaacacactaccaccaaagtgtcatttacattccaaaaccaacttgggggaaccatcccaaagttttcaacttggcaggcttgtctgtggagtatttccgctactatgatcctgcaacccgtggtcttgacttcaaaggcttgctcgaggatcttggcgctgcaccatctggagctattgtcttacttcatgcatgtgcacacaatcccactggagttgacccaacctctgaacagtgggaacagattcgacagctgatgagatctaaaagcttattacccttttttgatagtgcatatcagggttttgctagtggtagccttgacacagatgcacaatctgtccgtacatttgttgctgatggcggtgaatgcttgatagctcaaagttacgccaaaaatatgggactttatggggagcgtgttggtgcccttagcattgtctgcaagtcagcagatgtggctagtaaggttgagagccaggtgaagcttgttgtgcggcccatgtattcgagcccccctattcatggagcatcaattgttgccaccattctaaaaagcagtgatatgtacaacaactggaccatcgagctgaaagaaatggctgaccgtataaagagcatgcgccaacagttatttgaagctatacaagctagaggtacacctggtgactggagtcatattatcaaacagattgggatgtttacatttactggattgaacaaggagcaagttgaattcatgaccaaagagttccacatttacatgacctctgatgggagaataagcatggcaggtctaagttcgaagacagtgcctcaccttgccgatgctatgcatgctgcagtgacccgcctcggctaa

SEQ ID NO: 6 - protein, 405 aa, Arabidsopsis thaliana
MDSVFSNVARAPEDPILGVTVAYNNDPSPVKINLGVGAYRTEEGKPLVLDVVRKAEQQLVNDPSRVKEYIPIVGISDFNKLSAKLILGADSPAITESRVTTVQCLSGTGSLRVGAEFLKTHYHQSVIYIPKPTWGNHPKVFNLAGLSVEYFRYYDPATRGLDFKGLLEDLGAAPSGAIVLLHACAHNPTGVDPTSEQWEQIRQLMRSKSLLPFFDSAYQGFASGSLDTDAQSVRTFVADGGECLIAQSYAKNMGLYGERVGALSIVCKSADVASKVESQVKLVVRPMYSSPPIHGASIVATILKSSDMYNNWTIELKEMADRIKSMRQQLFEAIQARGTPGDWSHIIKQIGMFTFTGLNKEQVEFMTKEFHIYMTSDGRISMAGLSSKTVPHLADAMHAAVTRLG

SEQ ID NO: 7 - DNA, 1561 bp, Arabidsopsis thaliana
atttcttcattcgtaaacaaacacacacgaagcaaaaacaaaaatgaaaactactcatttctcttcctcttcttcttccgatcgcaggatcggtgctctgctccgtcatctcaattccggctcagattcggacaacctgagctctctttatgcatctccgacatcgggaggcaccggtggttctgttttctctcatcttgttcaagctccagaggatcctattcttggggtgacagttgcatacaacaaagatcctagcccagttaagctgaatttaggagttggtgcttaccgaactgaggagggaaaacctttggttcttaatgttgtgaggaaagctgagcagcagcttatcaatgacagaacaagaatcaaggagtatcttcccattgttggattggttgagttcaacaagttaagcgctaagctcatactaggcgctgacagtcctgctattcgggagaatcggattaccaccgtggagtgtttgtctggtactggttctctgagagttggaggagagtttttggctaaacattatcatcagaaaacaatttacatcactcagccaacatggggaaatcatccaaagattttcacgctcgctggtttgacagtgaaaacttaccgatactacgatccagcgacgcgtgggttgaactttcaaggtttattagaagaccttggtgctgccgcacctggttctatagtgcttctccatgcctgtgcccataaccctactggtgttgatccaaccattcaacaatgggagcaaatcaggaagttgatgcgatcaaagggattgatgcccttcttcgatagtgcttatcagggctttgcaagtggaagtcttgatacagatgcgaaacctattaggatgtttgttgctgatggcggagaatgcctcgttgctcaaagttatgcgaagaacatgggactctatggagaacgagttggagctctcagcattgtatgcaaatcagcagatgttgcggggagagttgaaagccaactgaaactagtgataaggccaatgtactcgagtcctccaatccatggtgcatcaatcgtggctgtaatcctccgtgacaagaatttgttcaacgaatggactctggaactgaaggccatggctgatcgtatcatcagcatgaggaaacagcttttcgaggcattacgtactcgaggcactcctggagactggagtcacatcataaagcagattggtatgtttaccttcacagggttaaacccagctcaagtctccttcatgactaaagagtaccacatctacatgacatctgacgggaggataagcatggctggtctgagttcgaagactgtacctcaccttgcagacgctatccatgctgttgtcaccaaagccgtctgagaaactgaacaccaccatgacaccaaagcttcataataaagattttgttcttttctttctattatagcatttccggcagtgacaagataaatgtcgttactattattattgtttcatcccagtatcaataaagtacgcaagaaagcttttgtgctctctcttctacta

SEQ ID NO: 8 - protein, 449 aa, Arabidsopsis thaliana
MKTTHFSSSSSSDRRIGALLRHLNSGSDSDNLSSLYASPTSGGTGGSVFSHLVQAPEDPILGVTVAYNKDPSPVKLNLGVGAYRTEEGKPLVLNVVRKAEQQLINDRTRIKEYLPIVGLVEFNKLSAKLILGADSPAIRENRITTVECLSGTGSLRVGGEFLAKHYHQKTIYITQPTWGNHPKIFTLAGLTVKTYRYYDPATRGLNFQGLLEDLGAAAPGSIVLLHACAHNPTGVDPTIQQWEQIRKLMRSKGLMPFFDSAYQGFASGSLDTDAKPIRMFVADGGECLVAQSYAKNMGLYGERVGALSIVCKSADVAGRVESQLKLVIRPMYSSPPIHGASIVAVILRDKNLFNEWTLELKAMADRIISMRKQLFEALRTRGTPGDWSHIIKQIGMFTFTGLNPAQVSFMTKEYHIYMTSDGRISMAGLSSKTVPHLADAIHAVVTKAV

SEQ ID NO: 9 - DNA, 1849 bp, Arabidsopsis thaliana
ttgaatccttgttaatctttttcttcaatctctcgatctgatcgttatcgaaaccgcgcgattctaaccaagtccaggtgacaaatcagctctgctaaaatactcacaaagtctcgtgatcatattttgtggatcacatcattgtcttatttttggaattgcttatcctcgcactagttcactgatttgagatctgtgcagttaattttgtgctccatagcgattccatggcttctttaatgttatctctcggttccacttctctgttaccgcgcgagattaacaaggataagctaaagcttggaacttctgcttcgaacccgttcctaaaagcaaagtcttttagcagagtgactatgacggttgcagtgaagccttctcgtttcgagggtataactatggctccaccagaccctattcttggagtcagtgaagcattcaaagctgacactaacgggatgaaactcaatcttggtgttggtgcttatcgtactgaggaactccagccttatgtgcttaatgttgttaaaaaggcggagaatttgatgttggagagaggagataacaaagagtatcttccaattgaggggttggcagcattcaacaaggctactgctgagttgctatttggagctggtcatcctgttattaaggaacaaagagtagcaacaattcagggtctttcgggaacaggttcactgcgattagcagcggctcttatagagcgttatttccctggagcaaaagttgtgatctcatcaccaacctggggtaatcacaagaatatcttcaatgatgccaaagttccgtggtccgaataccgctactatgatccaaaaacaattggtttggattttgagggaatgatagcagatataaaggaagctccagaaggatccttcatcttgcttcacggatgtgctcacaacccaactggaattgacccaacaccagaacagtgggtaaaaattgctgatgtcattcaggaaaagaaccatatcccatttttcgatgttgcataccagggctttgctagtggaagccttgatgaagatgcagcatctgtgagattatttgctgagcggggaatggagttttttgttgctcagtcatatagtaaaaatttaggtttgtatgcagaaagaattggggcaatcaatgtcgtgtgctcctcagctgatgctgctacaagggtcaagagccagttgaaaaggattgctcggcctatgtactcgaatccaccagttcatggggcgagaatcgtggccaatgtagtgggtgatgtaactatgttcagtgaatggaaagcagagatggaaatgatggcaggaagaataaagacggttagacaagagctgtatgatagcctcgtttcaaaagacaagagcgggaaggactggtccttcattctgaagcaaattggcatgttctctttcaccggcctaaacaaagctcagagcgataacatgacggacaaatggcatgtgtatatgactaaagacgggaggatatcattggccggattatctctggccaaatgcgagtatcttgctgatgcgatcatcgactcataccataacgtaagctgagcttccatctcagtagatgacaataagaaacagttttatataccctttttagcttcttcttgatctttgattgaaaccagatggctaaattaataagctagcatcacactatgattgctagacaattttcaaggaaacttttgatttgatcgtgtttgacaggccttgttgtattgggagactcccatcgagttatagaagaacttgttacgattgtattttacataatttcacaactatacttgaccggaagagttaca

SEQ ID NO: 10 - protein, 453 aa, Arabidsopsis thaliana
MASLMLSLGSTSLLPREINKDKLKLGTSASNPFLKAKSFSRVTMTVAVKPSRFEGITMAPPDPILGVSEAFKADTNGMKLNLGVGAYRTEELQPYVLNVVKKAENLMLERGDNKEYLPIEGLAAFNKATAELLFGAGHPVIKEQRVATIQGLSGTGSLRLAAALIERYFPGAKVVISSPTWGNHKNIFNDAKVPWSEYRYYDPKTIGLDFEGMIADIKEAPEGSFILLHGCAHNPTGIDPTPEQWVKIADVIQEKNHIPFFDVAYQGFASGSLDEDAASVRLFAERGMEFFVAQSYSKNLGLYAERIGAINVVCSSADAATRVKSQLKRIARPMYSNPPVHGARIVANVVGDVTMFSEWKAEMEMMAGRIKTVRQELYDSLVSKDKSGKDWSFILKQIGMFSFTGLNKAQSDNMTDKWHVYMTKDGRISLAGLSLAKCEYLADAIIDSYHNVS

SEQ ID NO: 11 - DNA, 1212 bp, Arabidsopsis thaliana
atgaattccatcttgtcaagcgtccttcctgctcccgaagatcctgttctcagtgtaatttttgcttgtagagatgatcctagtccggttaagttgaatttgagcgcaggtacctatcgaactgaggaaggaaagcctcttgttcttgatgttgtgagaagagcagagcaacagttagccaacgacctggacaaggaatatcttcccctcaatggacttcctgaatttaataaattaagtaccaagctcatcttaggtgatgatagtcctgcattgaaagagaatagagttgttacaacccaatgtttgtctggtactggttctttgagagttggagctgagtttctagcaacacacaacaaagaaagtgtcattttcgttccaaacccaacgtgggggaaccatccccgtatttttactttggcgggtttgtctgtccagtatttccgttattatgatccgaagagccgaggactcgacttcaaaggcatgctcgaggatcttggcgctgcacctcctggagctatagtggtacttcaagcttgtgcgcataaccccacaggagttgacccaacattcgaacaatgggaaaagattcgacgactagtgagatcgaaaagcttattacctttctttgatagtgcatatcagggttttgctagtggtagccttgacgcagatgcacaagcggttcgtatgtttgtagccgatggaggtgaatgtttgatagctcaaagttatgccaaaaatatgggcctttatggggagcgtattggctctcttacgatcgtatgcacatcagaagatgtcgctaagaaagttgagaaccaagtgctacttgttgtgaggcctatgtatcttacaccacctattcatggtgcatctattgttgccacaattctaaaaaacagtgatatgtacaatgactggaccattgagctgaaaggaatggctgaccgcataattagcatgcgtcaacagttatatgcagctctagaagctagaggaacacctggtgattggagtcacattattaaacatattgggatgtttacttttaccggattgagtgaggagcaagttcgcttgatggccaaagaatatcacatttacatgacttatgatgggaggataagcatggcaagtctaagttcgaagacagtgcctcaactcgctgatgctatacatgctgttgttactcgcatcgcctaa

SEQ ID NO: 12 - protein, 403 aa, Arabidsopsis thaliana
MNSILSSVLPAPEDPVLSVIFACRDDPSPVKLNLSAGTYRTEEGKPLVLDVVRRAEQQLANDLDKEYLPLNGLPEFNKLSTKLILGDDSPALKENRVVTTQCLSGTGSLRVGAEFLATHNKESVIFVPNPTWGNHPRIFTLAGLSVQYFRYYDPKSRGLDFKGMLEDLGAAPPGAIVVLQACAHNPTGVDPTFEQWEKIRRLVRSKSLLPFFDSAYQGFASGSLDADAQAVRMFVADGGECLIAQSYAKNMGLYGERIGSLTIVCTSEDVAKKVENQVLLVVRPMYLTPPIHGASIVATILKNSDMYNDWTIELKGMADRIISMRQQLYAALEARGTPGDWSHIIKHIGMFTFTGLSEEQVRLMAKEYHIYMTYDGRISMASLSSKTVPQLADAIHAVVTRIA

SEQ ID NO: 13 - DNA, 1603 bp, Brassica napus
ggtattcatacacacaaatcgaaaaacaatgaaaactaacgacttctcttcttcatcttcgtcgtcgccaagcgatcgcaggatcggcgctctcctccgtcatctcaccgccgggacagatgcggatcgcgtgagctccgttttcgcttcgcctacgtcgggaggcgcgggaggttctgttttcgctcatctcgttcaagctcccgaggatgctattctcggggtgacaattgcatataacaaggaccccagcccaattaagcttaatttgggagttggtgcttaccgaactgaggaggggaaacctttggttcttaatgttgtgaggaaagctgagcagcagcttatcaatgacaggtcacggatcaaggagtatcttcccattgttggattggttgagttcaacaagttaagcgctaagctcattttaggcgctgacagtcctgctattcgggagaatcgtgttacaaccgtggagtgtttgtctggtactggttccctgagagttggtggggaatttttggctaggcattatcatcagaaaacaatttatattcctcagccaacatggggaaaccatcccaaaattttcaccctcgctggcttgtcagtgaaaacttaccgctactatgatccatcaacacgtgggttgaactttcaaggtttattagaagaccttagtgctgccccacagggttcgatagtgcttctccatgcctgtgctcataacccaactggtgttgatccaacccttgaacaatgggagcaaatcaggaagttgatgcgttccaaaggattgatgccattctttgacagtgcttatcagggctttgcgagtggaagtctggatacagatgcgaaaccaattaggatgtttgttgctgatggaggagaattgctcgttgctcagagttatgcaaagaacatgggactctatggagaacgtgttggagctctcagcattgtatgcaaagcagcagatgtagcgggaagagttgagagccaactgaaacttgtaataaggccaatgtactcaaaccctccgatccatggtgcatccatcgttgctgtaatcctccgtgacaggaacttgttcaacgaatggactctggaactgaaagccatggctgatcgtatcatcagcatgaggaaacagcttttcgaggcattacgtgctcgaggcacgcctggagactggactcacatcatcaaacagatcggtatgtttaccttcacagggctaaacccagctcaagtctcctacatgactaaagagtaccacatctacatgacatccgacgggaggataagtatggctggtctgagctcgaagactgtaccgcaccttgcagacgctatccatgccgttgtcaccaaagccctctgagacatctcacaccaccaccacggttacatggtgataataaagaatcttaccttctttcagtatttccggcagtgacaagttaattgtcactaatattattgttatttcatctcaggggttaataaagtaggcaagagagttttgtgcctcttctactatttacattctcaatgtaactttgtagacagcaaccaattttcaatttttggttctatc

SEQ ID NO: 14 - protein, 452 aa, Brassica napus
MKTNDFSSSSSSSPSDRRIGALLRHLTAGTDADRVSSVFASPTSGGAGGSVFAHLVQAPEDAILGVTIAYNKDPSPIKLNLGVGAYRTEEGKPLVLNVVRKAEQQLINDRSRIKEYLPIVGLVEFNKLSAKLILGADSPAIRENRVTTVECLSGTGSLRVGGEFLARHYHQKTIYIPQPTWGNHPKIFTLAGLSVKTYRYYDPSTRGLNFQGLLEDLSAAPQGSIVLLHACAHNPTGVDPTLEQWEQIRKLMRSKGLMPFFDSAYQGFASGSLDTDAKPIRMFVADGGELLVAQSYAKNMGLYGERVGALSIVCKAADVAGRVESQLKLVIRPMYSNPPIHGASIVAVILRDRNLFNEWTLELKAMADRIISMRKQLFEALRARGTPGDWTHIIKQIGMFTFTGLNPAQVSYMTKEYHIYMTSDGRISMAGLSSKTVPHLADAIHAVVTKAL

SEQ ID NO: 15 - DNA, 1504 bp, Brassica napus
  misc_feature (1444)..(1444): n is a, c, g, or t
ggaggaaaaaaggcaatcgacgctaataaactctcttcatccagattcatcttttttacgatacctgctgtaatggactccgtattctcaaacgtcgttcgtgctcccgaagatcctattctcggtgtgacggttgcttacaacaatgatccaagcccagctaagctcaatttgggtgtcggtgcctatcgaactgaggaaggtaagccacttgttcttgacgtggttcgaagggcagagcaacagcttgtgaacgatccgtcccgggtcaaggaatatattcctatggctggacttgctgattttaataaactcagcgccaaactcatcttaggtgctgatagtcctgcaattcaagagagtagagttgctacaatccagtgcttgactggtactggttctttgagagttggtgctgagtttctcaaaaaacactaccaccaaagtgtcattttcattccaaaaccaacttgggggaaccatcccaaagttttcaacctggctggcttgtctgtggagtactaccgttactatgatcctgcaacccgtggacttggcttccacggcttgctcgaggatctgggcgctgcaccatctggagcgattgtcttacttcatgcatgtgctcacaatcccactggagttgacccaacctccgaacagtgggaacagattcggcaactaataagatctaaaagcttgttaccgttttttgatagtgcatatcagggttttgctagtggtagccttgacacagatgcacattcagtccgcacctttgttgctgatggcggtgaatgcttgatagctcaaagttatgccaaaaatatgggactctatggggagcgtgttggtgcccttagcattgtctgcaagtcatcagatgtggctagtaaggttgagagccaggtgaaacttgttgtgcgacccatgtactcgagcccacctattcatggagcatcaattgttgccaccattctgaaaagcagtgatatgtacaacgactggaccatcgagctgaaaggaatggctgaccgcattattagcatgcgccaacacttatttgaagctctacaagctaaaggcacacctggtgattggagtcacattatcaaacagattgggatgttcacttttactggattgaacaaggagcaagttgccttcatgaccaaagagtttcacatttacatgacatctgacgggagaataagcatggcaggtctcagttcgaagacggtgcctcacctggttgaagctatacatgctgcagttacccgcgtcgcctaaactaaagcgagacgatatttttcttgtttcgtagaataaaatgaaattttcaaaaacaaaaaaaaaacatcttccttggtttatagactaaggatttttcccattggtatcatatgtttcctcatatctttttggccaaggatgtttgaaccanacaaaccgagtattgcgacactgaaatcttcaatgttgaaggaaaatattggttattagc

SEQ ID NO: 16 - protein, 405 aa, Brassica napus
MDSVFSNVVRAPEDPILGVTVAYNNDPSPAKLNLGVGAYRTEEGKPLVLDVVRRAEQQLVNDPSRVKEYIPMAGLADFNKLSAKLILGADSPAIQESRVATIQCLTGTGSLRVGAEFLKKHYHQSVIFIPKPTWGNHPKVFNLAGLSVEYYRYYDPATRGLGFHGLLEDLGAAPSGAIVLLHACAHNPTGVDPTSEQWEQIRQLIRSKSLLPFFDSAYQGFASGSLDTDAHSVRTFVADGGECLIAQSYAKNMGLYGERVGALSIVCKSSDVASKVESQVKLVVRPMYSSPPIHGASIVATILKSSDMYNDWTIELKGMADRIISMRQHLFEALQAKGTPGDWSHIIKQIGMFTFTGLNKEQVAFMTKEFHIYMTSDGRISMAGLSSKTVPHLVEAIHAAVTRVA

SEQ ID NO: 17 - DNA, 1655 bp, Citrus sinensis
cccgggccgcaggccgcctacagttaaactaaccaaaccactccgaggccaatactatattaaacccaaacataattttctcttcacatttttttcccccacaaactctctcatttcattgatttcttgaaagaaatttaatggattctgaatcagtgtttggaaagattgttcgtgctcctgaagatcccattctaggggtcactgttgcttataacaaggatacaagcccagtcaagttgaacttgggtgttggtgcttaccgaactgaggaagggaaacctctggttctgaatgtagtgagaaaggcagagcagctcttagtgaatgaccagtcacgggtcaaagagtatcttcccattgttggacttgtggattttaataaattgagtgcaaagctcatccttggtgctgacagccctgcgattaaagacaacagagtgaccaccgttcagtgcttgtctggcactggttctttgagggttggagctgagtttctggcaaggcattatcaccaacttaccatatatattccacagccaacatggggaaaccatcccaaagttttcactttagcaggattgtctgtgaagacctaccgctattatgatccagcaacacgtgggctaaacttccaaggcttgctggaggatcttagggctgcaccatccggagctatagttcttcttcatgcatgtgctcataatccaactggtgttgacccgacccttgagcagtgggagcagatcaggcagctgatgaggtcaaaaggattgttacctttctttgacagtgcttatcagggttttgcaagtggtagcctagatgcagatgcacaatctgttcgcatgtttgtggcagatggtggcgaatgcctggtagctcagagttatgcgaaaaacatgggactctatggggaacgtgtcggcgccctcagcattgtctgcaagacagaagatgtggcaagcagggttgaaagccagttgaaactcgtgattaggcccatgtactctagtccacctattcacggggcctctattgtggctacaattctcaaggacagcactatgtataaagagtggactcttgaactgaaagcgatggctgaccggattataagcatgcgtcagcaactatttgatgctctgtctgctagaggcactccaggagactggagtcacattatcaagcaaataggaatgtttacattcacagggctgaacagtgaacaagttgccttcatgaccaaggagtatcacatttatatgacatctgatgggaggattagcatggcaggtcttagttcaaagacagttcctcatcttaccgatgctatacatgctgctgtaacccgaatgggctaagattaatcagacaagaattcatgccgtaagaattgtttggttttcagtcaccctcagcaatgcaaaaatgagtttgtagaactagaaaatgcataaataaaggttttacattaagaaaattttgttcttttggttttggtgttgtattcttgtctttccaccaaaacttgacatgtttattaagtagaagaaaaacgaaagttgcgatgttatttatttttgcatttatctttggggagatgccatttacatttttaactctccttgaaacgtttggtgactattttatag

SEQ ID NO: 18 - protein, 407 aa, Citrus sinensis
MDSESVFGKIVRAPEDPILGVTVAYNKDTSPVKLNLGVGAYRTEEGKPLVLNVVRKAEQLLVNDQSRVKEYLPIVGLVDFNKLSAKLILGADSPAIKDNRVTTVQCLSGTGSLRVGAEFLARHYHQLTIYIPQPTWGNHPKVFTLAGLSVKTYRYYDPATRGLNFQGLLEDLRAAPSGAIVLLHACAHNPTGVDPTLEQWEQIRQLMRSKGLLPFFDSAYQGFASGSLDADAQSVRMFVADGGECLVAQSYAKNMGLYGERVGALSIVCKTEDVASRVESQLKLVIRPMYSSPPIHGASIVATILKDSTMYKEWTLELKAMADRIISMRQQLFDALSARGTPGDWSHIIKQIGMFTFTGLNSEQVAFMTKEYHIYMTSDGRISMAGLSSKTVPHLTDAIHAAVTRMG

SEQ ID NO: 19 - DNA, 1421 bp, Centaurea Solstitialis
atcttgacaaaaatgggttccgattccatcttcgccagcatcacccaagcacctgaagatcctatccttggggttactgttgcttacaacaaagattctgatccatcaaaattgaacttgggtgtaggtgcatatcgaaccgaggaagggaaacccctggttctgaatgttgtaaggaaggcagagcaaaagcttgtgaatgatccgtcaagggttaaggagtatcttcccattgttggacttgcagatttcaataaatgtagtgccaaactcatttttggtgctgatagccctgccattcaagagaacagagttgctaccgtgcagtgcttatctggtaccggctcactaagggttggtggagagtttctcgcaaagcattatcatgaacgaacagtatacattccgcagccaacatggggaaaccatccaaaaatctttacgttagcaggattgtcggttaagtcataccgctactatgatcctgccacacgtgggcttgacttccaaggccttctcgaagatctaggtaacgctccatcgggcgcaatagtccttcttcatgcatgtgctcacaacccaacaggcgttgatcctaccatcgagcagtgggagcagatcagacagttaatgagatcaaaagctttgttgcctttcttcgatagtgcctatcagggttttgccagtggcagcctcgatgcagatgcacagcctgttcgcatgttcgttgcagatggtggtgaatgctttgcagctcagagttacgcgaaaaatatgggactctatggggaacgtgttggggcacttagcattgtttgcaaagcagaagatgttgcaaaaagggtagagagccaacttaaactggttatcaggccaatgtattctagtccacctcttcatggggcgtccattgtcgcaactatactcaaggacagtgatttgtacaatgaatggacggttgagctaaaagcaatggctgatcggattatcagcatgcgaaagcagctattggaggccctacaagcaaaaggaacacctggtgattggactcacatcataaagcaaatcggaatgtttacattcacaggacttaatgctgaacaagttgctttcatgacgaaagaatatcacatctacatgacttccgatgggagaatcagcatggctggtctgagttcaaagactatccctcatcttgctgatgctatgcatgctgctgttaccagtatggcttaagccaactccttatttgtcttatcttgtttcgcaccatattttgtagcaattttaaacaaatatcctttttgggtttgaaggattttcaaaccacttcttgaggctttttacaccttcccgttaagccgacgacccaatgtgaaactcgattcacattacataaaaagaagttcactttgtttgct

SEQ ID NO: 20 - protein, 407 aa, Centaurea Solstitialis
MGSDSIFASITQAPEDPILGVTVAYNKDSDPSKLNLGVGAYRTEEGKPLVLNVVRKAEQKLVNDPSRVKEYLPIVGLADFNKCSAKLIFGADSPAIQENRVATVQCLSGTGSLRVGGEFLAKHYHERTVYIPQPTWGNHPKIFTLAGLSVKSYRYYDPATRGLDFQGLLEDLGNAPSGAIVLLHACAHNPTGVDPTIEQWEQIRQLMRSKALLPFFDSAYQGFASGSLDADAQPVRMFVADGGECFAAQSYAKNMGLYGERVGALSIVCKAEDVAKRVESQLKLVIRPMYSSPPLHGASIVATILKDSDLYNEWTVELKAMADRIISMRKQLLEALQAKGTPGDWTHIIKQIGMFTFTGLNAEQVAFMTKEYHIYMTSDGRISMAGLSSKTIPHLADAMHAAVTSMA

SEQ ID NO: 21 - DNA, 1613 bp, Gossypium hirsutum
acgccgtggctcttggaaaagcagaagcgcccatagttcacggtgtttaagacgcccgctgcttcaacaaatcaacctatccctttctcgccttaaaaaacagaatctgaaaccccccccctgattatttgatcactctctaaaaccccagccaaacgagtctttccaaacccaatggattctgtgtttgcctccattgttcaagctcctgaagatcccattcttggggtgacagttgcttataacaaggatccaagcccaaacaagttgaatttaggtgttggtgcttacagaactgaggaaggaaaacctctagttctaaatgttgttcgaaaagcagaacagcttcttgttaatgacctgtcgagagtcaaggagtatcttcctattcttggtctcgcagagttcaataaattgagtgctaagctcattcttggtgatgacagtcctgctattcaagagaacagagtggctactgctcagtgcttgtctggtactggttccttgagggttggagctgagtttttagcaaagcattaccaccaacgtactatatacattccacagccatcatggggaaaccatgtgaaagttttcacgatggcagggttgtcggtgaagaattaccgctactatgatccaacaactcgtgggcttaatttccaaggtttgctagaagatcttggcgcagcaccagctggagctatagtgcttcttcatgcctgtgctcataatccaactggtgttgatccaactgttgagcaatgggaacagatcagacagtcgatgagatctaaagggttattgcctttctttgacagtgcttaccagggatttgcaagtggtagcttagatgcagatgcacaacctgttcgcacgtttgttgcagatggcggggaatgctttatagctcaaagttatgcaaaaaacatgggactttatggggagcgtgttggtgctctcagcattgtctgtaaggcggctgatgttgcaagcagggttgagagccagttgaagcttctgattaggcctatgtattccaatccaccaattcatggtgcctcaattgcaatgactatcctcaaaaatagtgatatgtataacgagtggaagattgaactgaaagctatggcagaccgaattattagcatgcggaaacaactatttgatgctttaagtgctaaaggtactccaggtgactggagtcacattataaagcagattggaatgtttactttcacaggattggacagtgatcaagttgctttcatgatcaaggagtaccacatctacatgacatctgatgggaggattagtatggcaggtcttagctccaagactgtgcctcatcttgctgatgctatacatgctgcagtgacccgtggctgttagaaagcaaattttaaagttctgtagcaagtactttttgggttttagccccatccatgtcatgactgttttcttcttaacttttcaagcacatattattttccataataactgttgggtctggattggaaccagatttttgatatttcgatttcaatgttagacagtacatgtccttttaaacttcatcgtaaatggcatgcttgctattggtatccaaaaaa

SEQ ID NO: 22 - protein, 405 aa, Gossypium hirsutum
MDSVFASIVQAPEDPILGVTVAYNKDPSPNKLNLGVGAYRTEEGKPLVLNVVRKAEQLLVNDLSRVKEYLPILGLAEFNKLSAKLILGDDSPAIQENRVATAQCLSGTGSLRVGAEFLAKHYHQRTIYIPQPSWGNHVKVFTMAGLSVKNYRYYDPTTRGLNFQGLLEDLGAAPAGAIVLLHACAHNPTGVDPTVEQWEQIRQSMRSKGLLPFFDSAYQGFASGSLDADAQPVRTFVADGGECFIAQSYAKNMGLYGERVGALSIVCKAADVASRVESQLKLLIRPMYSNPPIHGASIAMTILKNSDMYNEWKIELKAMADRIISMRKQLFDALSAKGTPGDWSHIIKQIGMFTFTGLDSDQVAFMIKEYHIYMTSDGRISMAGLSSKTVPHLADAIHAAVTRGC

SEQ ID NO: 23 - DNA, 1668 bp, Glycine max
tcattcttcttacataataggggaaggagaagaaaaaaaatgaaataagaaaaactcaactttgtaattcgtggagggaatacttttccattacgcacgcactttaattacagacgagaaaattataattaatagtaatacagacagcagcatgcgcccaccggttattctcaaaactaccacctctcttttggattcttcttcttcttcaccaccctgtgatcgcagactcaacactctcgctagacacttccttccgcaaatggcttctcacgacagcatctccgcttctccaacctccgcttctgattccgtcttcaatcacctcgttcgtgctcccgaagatcctatcctcggggtaactgtcgcttataacaaagatccaagtccagttaagctcaacttgggagttggtgcttaccgaactgaggaaggaaaacctcttgttttgaatgtagtgaggcgagttgaacagcaactcataaatgacgtgtcacgcaacaaggaatatattccgatcgttgggcttgctgattttaataaattgagtgctaagcttatttttggggctgacagccctgctattcaagacaacagggttaccactgttcaatgcttgtctggaactggttctttaagagttgggggtgaatttttggctaaacactatcaccaacggactatatacttgccaacaccaacttggggcaatcacccgaaggttttcaacttagcaggcttgtctgtcaaaacataccgctactatgctccagcaacacgaggacttgactttcaaggacttctggaagaccttggttctgctccatctggatctattgttttgctacatgcatgcgcacataaccccactggtgtggatccaacccttgagcaatgggagcagattaggcagctaataagatcaaaagctttgttacctttctttgacagtgcttatcagggttttgctagtggaagtctagatgcagatgcccaacctgttcgtttgtttgttgctgatggaggcgaattgctggtagcacaaagctatgcaaagaatctgggtctttatggggaacgtgttggcgccttaagcattgtctgcaagtcagctgatgttgcaagcagggttgagagccagctgaagctagtgattaggcccatgtactcaagtcctcccattcatggtgcatccattgtggctgccattctcaaggaccggaatttgttcaatgactggactattgagttgaaggcaatggctgatcgcatcatcagtatgcgccaagaacttttcgatgctttatgttccagaggcacacctggcgattggagtcacattatcaaacagattggaatgtttactttcactggattgaatgcggaacaagtttccttcatgactaaagagttccatatatacatgacatctgatgggaggattagcatggctggtctgagttccaaaactgtcccacttctggcggatgcgatacatgcagctgtaacccgagttgtctaaaacatgttgacaacagttttcaacatgctccctagtccctataggagaacttccattatttttgtttaataattgtcaacatcaacaatgaaaccttttatttgatgtgagatttttaaaggaaacttttctgcctaccgggctcc

SEQ ID NO: 24 - protein, 456 aa, Glycine max
MRPPVILKTTTSLLDSSSSSPPCDRRLNTLARHFLPQMASHDSISASPTSASDSVFNHLVRAPEDPILGVTVAYNKDPSPVKLNLGVGAYRTEEGKPLVLNVVRRVEQQLINDVSRNKEYIPIVGLADFNKLSAKLIFGADSPAIQDNRVTTVQCLSGTGSLRVGGEFLAKHYHQRTIYLPTPTWGNHPKVFNLAGLSVKTYRYYAPATRGLDFQGLLEDLGSAPSGSIVLLHACAHNPTGVDPTLEQWEQIRQLIRSKALLPFFDSAYQGFASGSLDADAQPVRLFVADGGELLVAQSYAKNLGLYGERVGALSIVCKSADVASRVESQLKLVIRPMYSSPPIHGASIVAAILKDRNLFNDWTIELKAMADRIISMRQELFDALCSRGTPGDWSHIIKQIGMFTFTGLNAEQVSFMTKEFHIYMTSDGRISMAGLSSKTVPLLADAIHAAVTRVV

SEQ ID NO: 25 - DNA, 1660 bp, Gossypium raimondii
ttttgccgtaaaaccaaacaggaaaaagtaagcgaaaattcatcattcaaacgtaccgaacaagctaaaatgcgccccgaattcacgtcaccgtcttcttcttcatcttcgtcggccgatcgtcggttaaacgctctggtccgacacctcgcaaccgcatcaatggtgtctcaaaccgccgtagcattttctcccacctccgggtttcatggagactccgttttctctcacgtcgttcgcgcccctgaagatcccattctcggagtgactgttgcatataacaaagatcccagccccgttaagttgaatttaggagttggtgcttatcgaactgaggaagggaagcctcttgttcttaatgtggtgagaaaagctgaacaaatgttgttgaacgataaatcacgtgttaaggaatatcttcccattgttggaatagcagagtttaataaattaagtgctaaacttatttttggtgctgacagccctgctattcgagagaatcgggttactacagttcagtgtttatctgggacgggttcattgagagttggagctgaatttttggctaggcattatcatcaaaaaactatatacattccacagccaacatggggaaatcaccccaaggtttttactttggcaggattatctgtgaaaacttaccgctattatgatccaacaacacgcggaatgaatttccaggggttattggaggaccttggctctgccccttctggatcaattgtgcttcttcatgcatgtgctcataatcccactggagtcgatcccacccttcagcagtgggagcaaattaggcagttgatgagatcgaaggcattgttacctttctttgatagtgcttatcagggttttgccagtggaaatcttgatgaagatgcacagtcgattcgtatgtttgttgctgatggtggtgaatgctttgtagctcagagttatgcaaagaacatgggcctctatggcgaacgtgttggtgcattgagtgttgtctgcagggcagccgatgtagcaagcaaggtcgaaagtcagctcaagcttgttattcggccaatgttttcaaatccaccaattcatggtgcatctattgtggcaaccatcctgaaggacagcaacatgttcaatgaatggactattgagttgaaggcaatggctgaccgtatcatcagcatgcgcaaacaactttttgatgctttgcgtgctagaggaacacctggtgactggagtcatatcatcaaacaaattggaatgtttaccttcaccggactaaattcaaagcaagtggaattcatgaccagagaataccatatctacatgacttctgatgggaggattagcatggcaggactgagttcaaagacagtccctcatctggctgatgcaattcatgctgcagttactcgtatgtcatagaaattgggcttagcacacacagcaggtcctcaatacacttgattgggaatcacatcaaatgagtatttgtttttcactttaccattcaataataactgtatttgaacaaaattgtagccctcaaaacactgaaagggcagaaagaaataaactcacttccacttgcttatattgttgtggtttttgtcaatggctaagatagcatttataaaacctttccatgctaatagtc

SEQ ID NO: 26 - protein, 452 aa, Gossypium raimondii
MRPEFTSPSSSSSSSADRRLNALVRHLATASMVSQTAVAFSPTSGFHGDSVFSHVVRAPEDPILGVTVAYNKDPSPVKLNLGVGAYRTEEGKPLVLNVVRKAEQMLLNDKSRVKEYLPIVGIAEFNKLSAKLIFGADSPAIRENRVTTVQCLSGTGSLRVGAEFLARHYHQKTIYIPQPTWGNHPKVFTLAGLSVKTYRYYDPTTRGMNFQGLLEDLGSAPSGSIVLLHACAHNPTGVDPTLQQWEQIRQLMRSKALLPFFDSAYQGFASGNLDEDAQSIRMFVADGGECFVAQSYAKNMGLYGERVGALSVVCRAADVASKVESQLKLVIRPMFSNPPIHGASIVATILKDSNMFNEWTIELKAMADRIISMRKQLFDALRARGTPGDWSHIIKQIGMFTFTGLNSKQVEFMTREYHIYMTSDGRISMAGLSSKTVPHLADAIHAAVTRMS

SEQ ID NO: 27 - DNA, 1543 bp, Helianthus annuus
cgggggtttccagaatgtaatcacaagccttgtcaggcaaagcattttcaacctgatgttagtttgcgtgccgcccacggtatttccataataaatcagcagctaaaatccgtctgagatttgcatataaacccacccccaatttcttattctctctcacaaattcaataataattcttgaagaacaaaaaaaatggctgatcattcaagctccgttttctctcaaatcgttcgtgctcctgaagatcccatcttaggggttactgttgcttacaacaaagattcagacccatcaaagttgaatttgggtgtaggtgcttatagaactgaggaagggaaacctttggttctcaatgttgtaagacaggcagaacaaaagcttgttaatgatccgtctcgggttaaggagtatcttcccattgttggacttgcagattttaataagggtagtgcaaagctcatttttggtgctgatagccctgcaattcaagagaacagagtcactaccgtgcagtgtttatccggaaccggctcactaagggtcggtggagagtttcttgcaaagcattactatgaaaaaacggtatacattccatctccaacatggggaaaccatccgaaaatcttcactttagccggattatccgtaaagacataccgttactatgatcctgccacacgtgggcttgacttccaaggccttctggaagatttgggtaacgctccaacgggagcaatagtcctccttcacgcatgtgctcacaatccaactggcgtcgatccaacccttgatcagtgggaacagatccgaaaattgatgagatcgaaagggttgttaccgtttttcgatagtgcgtatcagggttttgcaagtggcagcctcgatgcagatgcacaatctgttcgaatgtttgttgctgatggcggtgaatgctttgcagctcaaagttatgctaaaaatatgggactttacggcgaacgtgttggagcccttagcattgtttgcaaaaccgccgacgttgcaagcagggtagagagtcaacttaaattggttattaggccaatgtattcgagtccgcctcttcatggtgcgtctattgttgcaactatacttaaagacagtaatttgtacaatgagtggacggttgagcttaaagcaatggctgatcggattatcagcatgcgcaagcaattattagaagccctacaagcaagaggaacaccgggtgactggactcacattataaagcaaatcggaatgtttactttcaccgggctgaacgctgaacaagttgctttcatgacaagagagtatcacatctacatgacttccgatgggagaatcagcatggctggtctaagttcaaagactgtacctcatcttgcggatgctatgcatgctgctgttacccgtgttgcgtaaacaagcatgttttgttgtaagtcttaataaagctgtttttggattactttaagccggcatgattatcgcctaatctggaaactttattgacattattaaattgagccacttggttttgcg

SEQ ID NO: 28 - protein, 409 aa, Helianthus annuus
MADHSSSVFSQIVRAPEDPILGVTVAYNKDSDPSKLNLGVGAYRTEEGKPLVLNVVRQAEQKLVNDPSRVKEYLPIVGLADFNKGSAKLIFGADSPAIQENRVTTVQCLSGTGSLRVGGEFLAKHYYEKTVYIPSPTWGNHPKIFTLAGLSVKTYRYYDPATRGLDFQGLLEDLGNAPTGAIVLLHACAHNPTGVDPTLDQWEQIRKLMRSKGLLPFFDSAYQGFASGSLDADAQSVRMFVADGGECFAAQSYAKNMGLYGERVGALSIVCKTADVASRVESQLKLVIRPMYSSPPLHGASIVATILKDSNLYNEWTVELKAMADRIISMRKQLLEALQARGTPGDWTHIIKQIGMFTFTGLNAEQVAFMTREYHIYMTSDGRISMAGLSSKTVPHLADAMHAAVTRVA

SEQ ID NO: 29 - DNA, 1336 bp, Helianthus paradoxus
cgcggggaattataatataattcttgaagaaaaaaaaaaaaaatggctgatcattcaagctccgttttctcccaaatcgctcgtgctcctgaaaatcccatcttaggggttactgttgcttacaacaaagattcagacccatcaaagttgaatttgggtgtaggtgcttatagaactgaggaagggaaacctctggtgcttaatgttgtaagacaggcagaacaaaagcttgttaatgacccgtctcgggttaaggagtatcttcccattgttggacttgcagattttaataagggtagtgcaaagctcatttttggtgctgatagccctgcaattcaagagaacagagtcgctaccgtgcagtgtttatccggaaccggctcactaagagtcggtggagagtttcttgcaaagcattactatgaaaaaacggtatacattccatctccaacatggggaaaccatccaaagatcttcactttagccggattatctgtaaagacataccgttactatgatcctgcaacacgtgggcttgacttccaaggccttttggaagatttgggtaacgctccaacgggagcaatagtcctccttcacgcatgtgctcacaatccaactggcgtcgatccaacccttgatcagtgggaacagatccgaaaattgatgagatcgaaagggttgttaccgtttttcgatagtgcatatcagggttttgcaagtggcagcctcgatgcagatgcacaatctgttcgaatgtttgttgctgatggcggtgaatgctttgcagctcaaagttatgctaaaaatatgggactttacggcgaacgtgttggagcccttagcattgtttgcaaaacggccgatgttgcaagcagggtagagagtcaacttaaattggttattaggccgatgtattcgagtccacctcttcatggtgcgtctattgttgcaactatacttaaagacagtaatttgtacaatgagtggacggttgagcttaaagcaatggctgatcggattatcagcatgcgcaagcaattattagaagccctacaagcaagaggaacaccgggtgactggactcacattataaagcaaatcggaatgtttactttcaccgggctgaacgctgaacaagttgctttcatgacaagagagcatcacatctacatgacttctgatgggagaatcagcatggctggtctaagttcaaagactgtacctcatcttgcagatgctatgcatgctgctgttacccgtgttgcgtaaacaagcatgttttgttgtaagtcttaataaagctgtttttggattactttgagccgcggcatga

SEQ ID NO: 30 - protein, 409 aa, Helianthus paradoxus
MADHSSSVFSQIARAPENPILGVTVAYNKDSDPSKLNLGVGAYRTEEGKPLVLNVVRQAEQKLVNDPSRVKEYLPIVGLADFNKGSAKLIFGADSPAIQENRVATVQCLSGTGSLRVGGEFLAKHYYEKTVYIPSPTWGNHPKIFTLAGLSVKTYRYYDPATRGLDFQGLLEDLGNAPTGAIVLLHACAHNPTGVDPTLDQWEQIRKLMRSKGLLPFFDSAYQGFASGSLDADAQSVRMFVADGGECFAAQSYAKNMGLYGERVGALSIVCKTADVASRVESQLKLVIRPMYSSPPLHGASIVATILKDSNLYNEWTVELKAMADRIISMRKQLLEALQARGTPGDWTHIIKQIGMFTFTGLNAEQVAFMTREHHIYMTSDGRISMAGLSSKTVPHLADAMHAAVTRVA

SEQ ID NO: 31 - DNA, 1670 bp, Juglans regia
cgcgcggggacaaacaaacacgcgcacccgatcgaaatagaaagtagggtggggtctaaaatgcgcccacaggtaacctcaaccgaagcccattgtattgatacacctcgtgctttttcttcatcaatcgatcgaaggttgaacactctggtgagacaccttgttgccccatcgctcctgctcgactctcagattcggaacgatatcatgtctgcctctcccacctccggctttcatgccgattccgtcttcgctcacatcgatcgcgctcccgaagatcccatcctcggggtaactgttgcatataacaaagatccaagccccattaagctgaatttgggagttggcgcttaccggaccgaggaaggcaaacctcttgttctgaatgtagtgagacaagcagagcagcagcttgttaatgacaggtcacgcgtgaaggaatatcttccgattgttggactggcagacttcaataaattgagtgctaaacttattcttggtgctgacagccctgccgtccaagagaacagggttacaactgtccaatgcttgtctggtactggctcattgagagtcggtggtgaatttttggcgagacattatcatcaactcacaatttacattcccctgccaacatggggaaaccatccaaaagtatttactctagcaggtctatctgtgaaaacttaccgctattatgatccagcaacacgtgggctgaacttccaaggcctcctagaagaccttggttctgccccatctggagctattgtgttactccatgcatgtgcacacaaccctactggtgttgatccaaccattcagcagtgggagcagatcaggcagctgatgagatcaaaaagtttattgcctttcttcgacagtgcttatcaaggttttgcaagtggaagtctggatgcagatgcacagccagttcgtatgtttgttgccgatggtggtgaatgccttgtagctcaaagttatgccaagaacatgggactctatggtgaacgtgttggcgccttgagcatagtctgcaagacagctgatgttgcaagcagagttgagagccagcttaaacttgtcatcagaccaatgtattcaaacccacccattcatggtgcatctattgtggctacaatcctcaaggacagggacatgtacaatgaatggactattgaattgaaggaaatggctgaccgtattatcagcatgcgccagaaactttttgatgccttacgcgcaagaggtacaccaggggactggagtcatattattaagcagattggaatgtttactttcacgggattgaactcggaacaagttgctttcatgacaagagaataccacatatacatgacttctgatgggagaattagcatggcgggcctgagctccaagacggtcccccatcttgcagatgcaattcatgcagcagttactcgcgtggtctgattcttttgctggcctagtgagactctggaaggcctctccccacatcgggggactctttttccattttgctattttgttgtaataatggctacctcaagtaccgagtgcttcaagctgtcagtgcttcataattgaggtaatatctcaagagatatttggttttgagctttaaactctgcctctgggcacgtatttttacagcttgtatttgtagt

SEQ ID NO: 32 - protein, 464 aa, Juglans regia
MRPQVTSTEAHCIDTPRAFSSSIDRRLNTLVRHLVAPSLLLDSQIRNDIMSASPTSGFHADSVFAHIDRAPEDPILGVTVAYNKDPSPIKLNLGVGAYRTEEGKPLVLNVVRQAEQQLVNDRSRVKEYLPIVGLADFNKLSAKLILGADSPAVQENRVTTVQCLSGTGSLRVGGEFLARHYHQLTIYIPLPTWGNHPKVFTLAGLSVKTYRYYDPATRGLNFQGLLEDLGSAPSGAIVLLHACAHNPTGVDPTIQQWEQIRQLMRSKSLLPFFDSAYQGFASGSLDADAQPVRMFVADGGECLVAQSYAKNMGLYGERVGALSIVCKTADVASRVESQLKLVIRPMYSNPPIHGASIVATILKDRDMYNEWTIELKEMADRIISMRQKLFDALRARGTPGDWSHIIKQIGMFTFTGLNSEQVAFMTREYHIYMTSDGRISMAGLSSKTVPHLADAIHAAVTRVV

SEQ ID NO: 33 - DNA, 1816 bp, Lotus japonicus
ttcaaactttattcccagggacccaaccaaagcatatacatacacacattcagcatgcgcccaccggttcttctcgaaactacctctttttcttcttcttcttcttccccaagcgatcgcagactcaacgttctcgcaggccacctcgttcacaacgatcaaatggattctcagaacatctctccttctccaaccgcctcttctggttccgtcttcgctcatctcgttcgtgctcccgaagatcctattctcggggtgactgtcgctttcaacaaagatcctagccctgttaagctcaacttgggtgttggtgcttaccgaactgaggaaggaaaacctcttgttttgaatgtggtcaggaaagctcaacaccaaatcgtgaatgatccgtcacgcaacaaggagtatcttccaattgtggggctcgctgattttaataaattgagtgccaagcttatttttggtgctgacagccctgctattcaagagaacaggattaccactgttcagtgcttgtctggtactggttcattaagagttgggggtgaatttttggctaaacactatcaccaacggattatatacttgccaaaaccaacttggggcaatcacacaaaggttttcaccttggcagggttatctgtcaaaacatatcgctactatgctccagcaacacgagggcttgactttcaaggacttctagaagatcttggttctgccccatctggatccattgttttgctacatgcatgcgctcataaccctactggtgttgatccaacccctgagcaatgggagcagattaggcagctgataagatcaaaggctttattacctttctttgacagtgcttatcagggttttgctagtggaaatctagatgcagatgcacattctgttcgttcatttgttgctgatgggggtgaattgctggcagcccagagttatgcaaagaacatgggtctttatggagaacgtgttggtgccttaagcattgtctccaagtcagctgatgttgcaagtttggttgagagtcagctgaagcttgtcatcaggcccatgtactcaaatcctccccttcatggtgcatccattgtagctacgattcttaaggaccgggatttgtacaatgagtggactattgagttgaagggaatggctgatcgtattatcagtatgcgccaacaactttttgatgctttacgttccagaggcacgcctggtgactggagtcacattatcaagagtatcggtatgttcactttcacaggattgaatcctgagcaggtttccttcatgactaaagagtaccatatatacctgacatccgatgggcggattagcatggctggtttgagttccaaaaccgtcccacatctggcggatgctatacatgcggctgtaacccgagcttcctgaacatgtttggaaagatatctcaaccatagatgaaaaaatcaactgttagatattaacaaatcatggatttgttgaaatatactcttgattttctcatcaaccattgagatacctttactttctccctttaaagctttagaggagccaaattctatgagcgagcgcgattttcaactcacctagtaggacttccattttcaatgtaataatatcacatcaaacaatgaaaacttttttttgatgtgagaattagagacaacttttctgcccagggtgcctcggtctccgatcttggcattctaacattttcgccaagttttcctagtgtaagcatgatcaagtgcccccaagaaggaggctttctattttctaaataatttctgaaggataaagtacc

SEQ ID NO: 34 - protein, 454 aa, Lotus japonicus
MRPPVLLETTSFSSSSSSPSDRRLNVLAGHLVHNDQMDSQNISPSPTASSGSVFAHLVRAPEDPILGVTVAFNKDPSPVKLNLGVGAYRTEEGKPLVLNVVRKAQHQIVNDPSRNKEYLPIVGLADFNKLSAKLIFGADSPAIQENRITTVQCLSGTGSLRVGGEFLAKHYHQRIIYLPKPTWGNHTKVFTLAGLSVKTYRYYAPATRGLDFQGLLEDLGSAPSGSIVLLHACAHNPTGVDPTPEQWEQIRQLIRSKALLPFFDSAYQGFASGNLDADAHSVRSFVADGGELLAAQSYAKNMGLYGERVGALSIVSKSADVASLVESQLKLVIRPMYSNPPLHGASIVATILKDRDLYNEWTIELKGMADRIISMRQQLFDALRSRGTPGDWSHIIKSIGMFTFTGLNPEQVSFMTKEYHIYLTSDGRISMAGLSSKTVPHLADAIHAAVTRAS

SEQ ID NO: 35 - DNA, 1334 bp, Lactuca perennis
aattccaacttcagaatccattttcatacaaaaccccagttctatctcaaaatcacactcatcttctaaatcattacagcaaatctccagaagaaatatgactcactcggattccgtcttctcccaaatcgctaaagctcctgaagatcctatcttaggggttactgttgctttcaacaaagatacagactcttcaaagctgaatttgggtgtaggtgcttatagaactgaggaaggaaaaccactggttctgaatgttgtaaaacaggctgaacaaaagcttgttaataatccgtctcggattaaggagtatcttccaattgttggacttgcagattttaataaaggtagcgccaaactcatttttggtgctgatagccctgccattcaagaaaaccgagtcgccactgtccaatgcttatctggcactggctcactgcgagttggtggagagtttttagcaagacattatcatgaaaaaaccatatacattccaaacccaacatggggaaaccatccaaaaatcttcacatttgcaggattatcagtcaagacttatcgctactatgaccccacaacacgtggccttgacttcaaaggccttctagaagatctgggtaatgctccatcaggagcaatagtacttcttcatgcatgtgctcacaacccgacaggtgtcgatcccaccattgaacaatgggaggagatcagacagttagtcaggtcaaaagaattgttaccttttttcgacagtgcgtatcagggttttgctagtggcagcctggatgcagatgcaaaacccgttcgcttgtttgttgcagatggtggtgaatgctttaccgctcaaagttatgccaaaaatatgggactttacgccgaacgtgttggtgcccttagcattgtttgcaaaacgtcagatgttgcgagcagggtagagagccagctaaaactagttatccggccaatgtattctagcccacctcttcatggagcatctattgtctcaactatactcaacaacagtaatttgtacaatgagtggacgcttgagctcaaagcaatggctgaccggattatcagcatgcgtacacaactattggaagccctaaaagcaaaaggaacaccgggtgactggactcatatcataaagcaaattggaatgttcactttcactgcgctgaatgcagaacaagttgctttcatgactaaagaatatcatatctacatgacttctgatgggagaatcagcatggctggtttgagttcaaagacaatccctcatcttgcagatgctatgcacgctgctgttacaacaatggcgtaaacaaaacaac

SEQ ID NO: 36 - protein, 408 aa, Lactuca perennis
MTHSDSVFSQIAKAPEDPILGVTVAFNKDTDSSKLNLGVGAYRTEEGKPLVLNVVKQAEQKLVNNPSRIKEYLPIVGLADFNKGSAKLIFGADSPAIQENRVATVQCLSGTGSLRVGGEFLARHYHEKTIYIPNPTWGNHPKIFTFAGLSVKTYRYYDPTTRGLDFKGLLEDLGNAPSGAIVLLHACAHNPTGVDPTIEQWEEIRQLVRSKELLPFFDSAYQGFASGSLDADAKPVRLFVADGGECFTAQSYAKNMGLYAERVGALSIVCKTSDVASRVESQLKLVIRPMYSSPPLHGASIVSTILNNSNLYNEWTLELKAMADRIISMRTQLLEALKAKGTPGDWTHIIKQIGMFTFTALNAEQVAFMTKEYHIYMTSDGRISMAGLSSKTIPHLADAMHAAVTTMA

SEQ ID NO: 37 - DNA, 1429 bp, Lactuca perennis
cgggggaaaagagcggggcagacgcaatacacaaacggaaaacgtaaacaagtcaaaaatgaactcctcgtcggcagatcggaggttgtatatgctttcacgtcacctcgccggagagattggtaatgaaggtagtggtatctcatcttccccaacttctgccggaaattctgtcttcgctaacgtagttcgtgctcccgaagatccgattctcggggtgactgttgcttataacaaagacccaagccctatcaagctaaatttaggcgttggtgcttatcgtacagaggaaggaaaacctctggtcctaaatgtggtgagaaaagcagagcagctacttgtgaatgacaggtctcgtgtcaaggaatatctccccattgttggattagcagattttaacaaattaagtgcaaaacttatactcggagctgacagtcctgctatccagggaaaccgggtgacaacagtacagtgtttgtctggtactgggtcattgcgagttggaggcgagtttctatccaaacactattaccaacgtactatatatataccaaatccaacatggggaaaccatacaaaaatattcactcttgctggtttgactgtgaaaacatatcgctactatgatccagtgacacgtggattgaacatccaaggcttactagaagaccttaattctgctccatctggatcaattgttcttctacatgcatgtgctcataatcccacaggtgttgatccaacacttgaacaatgggagcaaataagacagctgattagatccaaaaatctcttaccattttttgatagtgcatatcagggttttgcaagtggaagtctagataaagatgctcaatcagttcgcatgtttgttggtgatggtggcgaatgctttatagctcaaagttatgctaaaaatatgggcctttatggcgaaagagttggtgctttgagcattgtttgtaggagtgctgacgtggcaagtagggtagagagcctgttaaaacttgtgataaggcctatgtactcaagtccacccatccatggtgcttcaattgtggctaccattctcaaagacagaaagttgtatgatgaatggacacttgaattgaaggcaatggctgatcgtattattaccatgcgaaaacagctttttgatgctttatctgctagagggacacctggcgactggagccacattataaagcaaatcgggatgtttacattcacagggcttaatacaaagcaagtaaccttcatgacaaaagacttccacatctacatgacatctgatgggcgtattagcatggcgggtttaagctcaaggactgttcctcaccttgcagatgcgatacatgctgctgtaaccactgttggttaaattaagtaagttggttgattgctaatttttaattatatttttttttta

SEQ ID NO: 38 - protein, 440 aa, Lactuca perennis
MNSSSADRRLYMLSRHLAGEIGNEGSGISSSPTSAGNSVFANVVRAPEDPILGVTVAYNKDPSPIKLNLGVGAYRTEEGKPLVLNVVRKAEQLLVNDRSRVKEYLPIVGLADFNKLSAKLILGADSPAIQGNRVTTVQCLSGTGSLRVGGEFLSKHYYQRTIYIPNPTWGNHTKIFTLAGLTVKTYRYYDPVTRGLNIQGLLEDLNSAPSGSIVLLHACAHNPTGVDPTLEQWEQIRQLIRSKNLLPFFDSAYQGFASGSLDKDAQSVRMFVGDGGECFIAQSYAKNMGLYGERVGALSIVCRSADVASRVESLLKLVIRPMYSSPPIHGASIVATILKDRKLYDEWTLELKAMADRIITMRKQLFDALSARGTPGDWSHIIKQIGMFTFTGLNTKQVTFMTKDFHIYMTSDGRISMAGLSSRTVPHLADAIHAAVTTVG

SEQ ID NO: 39 - DNA, 1551 bp, Nicotiana tabacum
ggccattacggccgggggtcactccataaattcctcaagaaagatcacacttccattacatctttgaagtttttctctgaagaaatcccattcattttttcaaaatggcaaattcctccaattctgtttttgcccatgttgttcgtgctcctgaagatcccatcttaggagtcacagttgcttataacaaagataccagcccagtgaagttgaatttgggtgttggcgcatatcgcactgaggaaggaaagccccttgttcttaatgtggtgagacgggctgaacaaatgctcgtcaatgacacgtctcgggtgaaggagtatctctcaattactggactagcggattttaacaaactgagtgcaaagcttatatttggtgctgacagccctgccattcaagagaacagggtgactactgttcagtgcttgtcgggcacaggttctttgagggttggggctgaatttctggctaagcattatcatgaacataccatatatataccacagccaacatggggaaaccatccgaaggttttcactttagccgggctttcagtaaaatattaccgttactacgacccagcaacacgaggcctggatttccaaggacttttggatgatcttgctgctgcacccgctggagcaatagttcttctccatgcatgtgctcataacccaactggcgttgatccaacaaatgaccagtgggagaaaatcaggcagttgatgaggtccaagggcctgttgcctttctttgacagtgcttaccagggttttgccagtggcaacctagatgcagatgcacaatctgttcgcatgtttgtggctgatggtggtgaatgtcttgcagctcagagttatgccaaaaacatgggactgtatggggagcgtgttggtgcccttagcattgtttgcaaagacgcagatgttgcaagcagagtcgaaagccagctaaagctggttatcaggccaatgtactctaatccaccaattcatggtgcgtctattgttgctactatactcaaggacagacaaatgtacgatgaatggacaattgagctgaaagcaatggccgacaggattattagcatgcgccaacaactctttgatgccttgcaagctcgaggtacgacaggtgattggagtcatatcatcaagcaaattggaatgtttactttcacaggattaaatactgagcaagtttcattcatgactagagagcatcacatttacatgacatctgatgggagaattagcatggcaggccttagttctcgcacaattcctcatcttgccgatgccatacatgctgctgttaccaaagcggcctaaatgagttcagttgcattcaagagcagtctaattgagaaactgagtctgtttttccttgatcgcttccttatcctttgatgttaaataaaaacttgtatgactatatagacatagtatttggatgtcagattttgaaatcccattattaagggatttgatgaatgcaaatcaccttccgtcaaattattaagttagcctgaatgttatgaattcttaa

SEQ ID NO: 40 - protein, 409 aa, Nicotiana tabacum
MANSSNSVFAHVVRAPEDPILGVTVAYNKDTSPVKLNLGVGAYRTEEGKPLVLNVVRRAEQMLVNDTSRVKEYLSITGLADFNKLSAKLIFGADSPAIQENRVTTVQCLSGTGSLRVGAEFLAKHYHEHTIYIPQPTWGNHPKVFTLAGLSVKYYRYYDPATRGLDFQGLLDDLAAAPAGAIVLLHACAHNPTGVDPTNDQWEKIRQLMRSKGLLPFFDSAYQGFASGNLDADAQSVRMFVADGGECLAAQSYAKNMGLYGERVGALSIVCKDADVASRVESQLKLVIRPMYSNPPIHGASIVATILKDRQMYDEWTIELKAMADRIISMRQQLFDALQARGTTGDWSHIIKQIGMFTFTGLNTEQVSFMTREHHIYMTSDGRISMAGLSSRTIPHLADAIHAAVTKAA

SEQ ID NO: 41 - DNA, 1892 bp, Picea glauca
gcacgaatatccattcaaacactattattagctttgagcagaatgatggggaagagctcatccacttgttcgtttgaggagaaggaaagtgataaaagtttaagtgtcgcgggtaggagaattggatcgcttgtgaggcaattagctgcaacttcaatggaggggcaagcagatagagatggtgatcttcgttttcagccaactgcgggttctgcagtctctgcattccaacacttggaacaggctcccgaggatccaattcttggggtgacagttgcctataacaaggatccgagccctgtgaaattgaatttgggtgttggggcgtatcgaactgaggaaggaaaacctctcgtgctggatgttgtcaggcaagcagaggagctcttaattcaagacaggtctcgatataaggagtatattcctatagctggtcttgtagagttcaacaaactaagtgcgaagctgattcttggtgatggaagtcctgctattggggagaaaagggttgccactgcacaatgcttatctggaacaggttcactcagggttggagctgagtttctgtcaaagcattatagccaacacataatttatattccagtacccacatggggtaaccatcccaagatctttaatcttggaggattgagtgtgaagacatatcgctattatgatcccagaacaagtgggcttgattacgaaggtatgcttgaagatctacattcagctcctcctggagctatagtgcttcttcatgcatgtgcacataatccgactggtgtagatcctacacaagaccaatgggaaggaattcggcaattaatcagattaaaaggtctgctgccattttttgacagtgcttatcagggatttgccagtggaagccttgatgcagatgcatactctgttcgtctgtttgtaggagatggtggtgaatgccttattgctcagagttttgcaaagaatatggggctgtatggggagcgtgtgggtgctcttagtattgtttgcaggagtgcaacagtggcaactagagttgaaagtcagttgaaattggttattcggccaatgtactcaagcccccctattcacggtgcttcgattgtggcaacaattctcagtgacaggaatctttattacaattggactgttgaattgaaaaacatggcagatcgcattattagtatgcgccatcagctctatgatgctctgaaggctcgtggaacccctggagactggagccacattattaagcagattggaatgttcacttttactggcctgaacaaagatcaagtttcatttatgactgcagaataccatatttatttgacttctgatgggcggataagtatggcaggtctgagctctaaaacagtcccacaccttgcagatgctatccatgccgctgttctccgccttggttagcagcatggttttccatacaataacttttgtgcataaaataaaacatgcaaggcctgaacttgcaaagcagattttcttgcaagaggcaaagagctgcagaattttttatcatatcatttgatttttcgtgcaattcatcaattaccgagacttggataattagtgcacatagcttctcttttcaaagtgataaactttgatattatgtagcaactcatccttttatcaaaatccctctttttactatttgctagtttatcgaccgaaatgatgttaatacaatcatgaaccaatatgcaatagttgcttaggatttttcttgtatatcagatactgtcacatcagctggaggattataacttatagtacatgctcattgttctgctactatggattttttgcatgaaatactctacgagggaattatcctttgtattcattatattccgatacacagttta

SEQ ID NO: 42 - protein, 462 aa, Picea glauca
MMGKSSSTCSFEEKESDKSLSVAGRRIGSLVRQLAATSMEGQADRDGDLRFQPTAGSAVSAFQHLEQAPEDPILGVTVAYNKDPSPVKLNLGVGAYRTEEGKPLVLDVVRQAEELLIQDRSRYKEYIPIAGLVEFNKLSAKLILGDGSPAIGEKRVATAQCLSGTGSLRVGAEFLSKHYSQHIIYIPVPTWGNHPKIFNLGGLSVKTYRYYDPRTSGLDYEGMLEDLHSAPPGAIVLLHACAHNPTGVDPTQDQWEGIRQLIRLKGLLPFFDSAYQGFASGSLDADAYSVRLFVGDGGECLIAQSFAKNMGLYGERVGALSIVCRSATVATRVESQLKLVIRPMYSSPPIHGASIVATILSDRNLYYNWTVELKNMADRIISMRHQLYDALKARGTPGDWSHIIKQIGMFTFTGLNKDQVSFMTAEYHIYLTSDGRISMAGLSSKTVPHLADAIHAAVLRLG

SEQ ID NO: 43 - DNA, 1230 bp, Physcomitrella patens
atggctccctctgtgtttgagcacgttcagcaagcacccgaggatcccattttgggggtaacagtggcttacaacaaggatccaagtccattgaaggtgaaccttggagtcggagcctaccgaacagaggaaggcaaaccacttgttctcaatgtggtacggcgagcagaacaacagttggttgcagatagatcgaggaacaaggagtaccagcccattacaggaatttctcagttcaacaaacttagcgcaaagcttattctgggcgctaatagtccagcaattgcagagaaccgtgttgccaccgtgcaagccttatccgggactggtgccttgagggttggcgcagagttcatatcgaggcattatgccaagccaattatattcttgcctaatccaacgtggggaaatcacaacaagattttcccgttgggaggagtgcctcagaagccatacagatattatgaccctaagacgcgcggattggactacgaaggtatgttggaggacttgaaggcagcccctgatggcgcagtcattttgctccatgcgtgtgcacacaatcccactggtgttgacccgactgaagagcagtgggaagggattcgacaggttattagaagcaagcatcagcttcccttttttgactgtgcataccagggattcgctagtggaagtctggacaaagacgcccatgctgttcgcttatttgtagctgatggtggggaatgttttgttgcacaaagttatgctaagaacatgggactttatggagagcgagtcggtgcattaagcgtcgtgtgtacgaatgctgctgtggcaagtcgggtagacagtcagttaaaactggtcatccgccccatgtactctagccccccggctcatggtgcagccattgcagcgacgattctagctgacgggcgtcttttccaggaatggacggtagagttgaagggtatggcagatcggattattagcatgcgtcaacagctctatgacgctctgcaagctcgaggcacacctggcgattggactcacgttctgaagcagattggaatgttcactttcacgggattgaacaagtctcaagtcgagttcatgacccgtcaatatcacatctacatgacctcagatgggcgtataagtatggctggattaagcagcaaaactgttccacatttggcggacgcaattcatgcagctgtggttggagctcagcgcaagagttag

SEQ ID NO: 44 - protein, 409 aa, Physcomitrella patens
MAPSVFEHVQQAPEDPILGVTVAYNKDPSPLKVNLGVGAYRTEEGKPLVLNVVRRAEQQLVADRSRNKEYQPITGISQFNKLSAKLILGANSPAIAENRVATVQALSGTGALRVGAEFISRHYAKPIIFLPNPTWGNHNKIFPLGGVPQKPYRYYDPKTRGLDYEGMLEDLKAAPDGAVILLHACAHNPTGVDPTEEQWEGIRQVIRSKHQLPFFDCAYQGFASGSLDKDAHAVRLFVADGGECFVAQSYAKNMGLYGERVGALSVVCTNAAVASRVDSQLKLVIRPMYSSPPAHGAAIAATILADGRLFQEWTVELKGMADRIISMRQQLYDALQARGTPGDWTHVLKQIGMFTFTGLNKSQVEFMTRQYHIYMTSDGRISMAGLSSKTVPHLADAIHAAVVGAQRKS

SEQ ID NO: 45 - DNA, 1681 bp, Prunus persica
cttggaacgaataaaactgcctaacatgcgcccacagttcacatcacccgacgcccatagttcttcacctgccctttcttcttcttcttcttcttcttctttttcaagcagcagtgatcggaggatcaacgctctcgtgcgtcaccttgattcgtctgccatggatcctaacaacaacagctcaatctctgcttcgccaacttcggcacatgccaattctgtcttcgctcacgtcgttcgcgcccctgaggatccaatacttggggtgactgttgcatacaacaaagatccgagcccagctaagttgaatttgggtgttggtgcttatcgaactgaggaaggaaaaccacttgttctgaatgtagtgaggaaagcagaacagctgcttgttaatgacaggtctcgcgttaaggaatatttgcctattgttggactggcagatttcaataaactgagtgctaagctgattcttggtgctgacagccctcctattcaagagaaccggattactactgtccaatgtctgtcaggaactggctcattgagagttggaggtgaatttttggcaaagcattatcatgaacgcacaatatacataccccagccgacatggggaaaccacacaaaagttttcactctggcagggttgtctgtgaaaagttaccgatattatgatccagcaacgcgtggcctcgacttccaaggcctcttagaagaccttcgttctgccccagctggagcaattgtacttctccatgcatgtgctcataaccccactggtgttgatccaacccttgagcagtgggagcagatcagacagcttgtgagatcaagaggattattaccattctttgacagtgcttatcagggttttgctagtggaagtttggatgcagatgcagagtctgttcgtaggtttgctgctgatggtggagagtgcctcatagctcaaagttacgcgaaaaacatggggctctatggagaacgtgttggtgccctaagcattgtctgcaagactgctgatgttgcaagtaaggttgagagccaagtgaagcttgtgatcaggcccatgtattcaaaccctcccattcacggtgcatctattgtagccaccattctcaaggatagggacttgttcaacgaatggacaattgagttgaaggcaatggctgaccgtatcatcagcatgcgacatcaactgtttgaatccttgcgcgccaagggcacacctggtgactggagccacatcatcaagcagattggaatgtttaccttcacaggattgaactccgagcaagttgctttcatgactaaagagtaccatatctacatgacatctgatgggaggatcagcatggctggtctgagttcgaggaccgtcccccatcttacagaggcaatacatgcagctgttactcgcgttgcctaaatcatgtttccagggcaacattttttccttttttgtgagccaaatccatatcggattctaccctttccagattttttgttgtaataattgtttacctcattaaatgaggttaaagatttggcgagtacgaagtgagcgatctagcgatgcgctgtaccctacctggattctttttcacagggtttgtgagtttttgtttcaacctgctaccttacaatatatatatatatatatatgcatcttctttatccc

SEQ ID NO: 46 - protein, 467 aa, Prunus persica
MRPQFTSPDAHSSSPALSSSSSSSSFSSSSDRRINALVRHLDSSAMDPNNNSSISASPTSAHANSVFAHVVRAPEDPILGVTVAYNKDPSPAKLNLGVGAYRTEEGKPLVLNVVRKAEQLLVNDRSRVKEYLPIVGLADFNKLSAKLILGADSPPIQENRITTVQCLSGTGSLRVGGEFLAKHYHERTIYIPQPTWGNHTKVFTLAGLSVKSYRYYDPATRGLDFQGLLEDLRSAPAGAIVLLHACAHNPTGVDPTLEQWEQIRQLVRSRGLLPFFDSAYQGFASGSLDADAESVRRFAADGGECLIAQSYAKNMGLYGERVGALSIVCKTADVASKVESQVKLVIRPMYSNPPIHGASIVATILKDRDLFNEWTIELKAMADRIISMRHQLFESLRAKGTPGDWSHIIKQIGMFTFTGLNSEQVAFMTKEYHIYMTSDGRISMAGLSSRTVPHLTEAIHAAVTRVA

SEQ ID NO: 47 - DNA, 1910 bp, Picea sitchensis
gagacccacccaacagcacgaatatccattcaaacactattattagctttgaggagaatgatggggaagaactcatcggcttgttcgtttgaggagaaggaaagcgataaaagtttaagtgtcgcgggtaggagaattggatcgcttgtgaggcaattagctgcaacttctatggaggggcaggcagatagagatggtgatcttcgttttcagccaactgcgggttctgcagtctctgcattccaacacttggaacaggctcctgaggatccaattcttggggtgacagttgcctataacaaggatccgagccctgtgaaattgaatttgggtgttggggcgtatcgaactgaggaaggaaaacctctcgtgctggatgttgtcaggcaagcagaggagctcttaattcaagacaggtctcgatataaggagtatattcctatagctggtcttgtagagttcaacaaactaagtgcgaagctgattcttggtgatggaagtcctgctattggggagaaaagggttgccactgcacaatgcttatctggaacaggttcactcagggttggagctgagtttctgtcaaagcattatagccaacacataatttatattccagtacccacatggggtaaccatcccaagatctttaatcttggaggattgagtgtgaagacatatcgctattatgatcccagaacaagtgggcttgattacgaaggtatgcttgaagatctacatgcagctcctcctggagctatagtgcttcttcatgcatgtgcacataatcctactggtgtagatcctacacaagaccaatgggaaggaattcggcaattaatcagattaaaaggtctgctgccattttttgacagtgcttatcagggatttgccagtggaagccttgatgcagatgcatactctgttcgtctgtttgtaggagatggtggtgaatgccttattgctcagagttttgcaaagaatatggggctgtatggggagcgtgtgggtgctcttagtattgtttgcaggagtgcaacagtggcaactagagttgaaagtcagttgaaattggttattcggccaatgtactcaagcccccctattcacggtgcttcgattgtggcaacaattctcagtgacaggaatctttattacaattggactgttgaattgaaaaacatggcagatcgcattattagtatgcgccatcagctctatgatgctctgaaggctcgtggaacccctggagactggagccacattattaagcagattggaatgttcacttttactggcctgaacaaagatcaagtttcatttatgactgcagaataccatatttatttgacttctgatgggcggataagtatggcaggtctgagctctaaaacagtcccacaccttgcagatgctatccatgctgctgttctccgccttggttagcagcatggttttccatacaataacttttgtgcataaaataaaacatgcaaggcctgaacttgcaaagcagattttcttgcaagaggcaaagagctgcagaattttttatcatatcatttgatttttcgtgcaattcatcaattaccgagacttggataattagtgcacatagcttctcttttcaaagtgataaactttgatattatgtagcaactcatccttttatcaaaatccctctttttactatttgctagtttatcgaccgaaatgatgttaatacaatcatgaaccaatatgcaatagttgcttaggatttttcttgtaaatcagatactgtcacatcagctggaggattataacttatagtacatgctcattgttctgctactatggattttttgcatgaaatactctacgagggaattatcctttgtattcattatattccgatacacagtttattg

SEQ ID NO: 48 - protein, 462 aa, Picea sitchensis
MMGKNSSACSFEEKESDKSLSVAGRRIGSLVRQLAATSMEGQADRDGDLRFQPTAGSAVSAFQHLEQAPEDPILGVTVAYNKDPSPVKLNLGVGAYRTEEGKPLVLDVVRQAEELLIQDRSRYKEYIPIAGLVEFNKLSAKLILGDGSPAIGEKRVATAQCLSGTGSLRVGAEFLSKHYSQHIIYIPVPTWGNHPKIFNLGGLSVKTYRYYDPRTSGLDYEGMLEDLHAAPPGAIVLLHACAHNPTGVDPTQDQWEGIRQLIRLKGLLPFFDSAYQGFASGSLDADAYSVRLFVGDGGECLIAQSFAKNMGLYGERVGALSIVCRSATVATRVESQLKLVIRPMYSSPPIHGASIVATILSDRNLYYNWTVELKNMADRIISMRHQLYDALKARGTPGDWSHIIKQIGMFTFTGLNKDQVSFMTAEYHIYLTSDGRISMAGLSSKTVPHLADAIHAAVLRLG

SEQ ID NO: 49 - DNA, 1769 bp, Populus trichocarpa
gaaagatgagaaacaactaccttcatctttcgccgcgtaagctataagaagccttctcatatctctctcttactagaagacaggatcccagaacagaacgcttcgaaatcaagaatttcaagaagccaaatcgagaaagctaaagaatttttcgacaaaaactgcaaagcaaaatgaacccagaattgacatcaccatcttcttctagtgatcgcagaattagcgtattagcaagacaccttgttggtgttgaaatggaccctcagaacgacagcatttcggcttttcctacttcaggttctgacagcaactctgttttctcccacgttgttcgcggtcctgaagaccccatcctcggtgtgactgttgcttataacaaagatcccagtcctgttaagctcaatttgggtgttggcgcttatagaactgaagaaggaaagcctcttgttttgaatgtagtgagaaaagctgagcagctgcttgttaatgacaggtcgcgagttaaggagtatcttcctattactggattggcagaattcaataaattgagtgctaagcttatgtttggtgccaactgccctgcaattcaagagaacagggttacaacagttcaatgcttgtctggcactggttcattgcgtgttggagctgaatttctggcaaaacaccatcatcaacggacaatatacattccccagccaacatggggaaaccaccctaaaattttcactttggcagggttatctgtcaaaacttaccgctattatgatccagcaacacgtgggctgaatttccaaggcctcgtggaagaccttaattctgccccatctggagctattgttcttcttcatgcctgtgctcataaccccacgggcgttgatccaacttctcagcagtgggagcagatcaggaagttgatgaggtcaaaagggttgatgcctttctttgatagtgcttatcagggttttgcaagcggaagtctggatgctgatgcacagcctgttcgcatgtttgttgctgatggcggtgaacttcttctagctcagagttatgcaaagaacatggggctatatggggagcgcattggtgctttgagcattgtttgcaagacagctgatgttgcaggcagggttgaaagccagttgaaacttgtgattagacccatgtattcaaacccacctattcatggtgcatctattgtggctgctattctaaaggacagggatttgtacaatgagtggaccatcgagttgaaggctatggctgaccgtataatcagcatgcgccagaaactctttgaagccttgcatgctagagggacacccggtgactggagtcacattgttaaacaaattggaatgtttacattcactggactgaactctaagcaagttgctttcatgactaaagagtaccacatctacatgacatcagatgggcggattagcatggctggtttgagctcaaagacagtccctcatcttgcagatgctatgcatgcagctgttaagcgagttgtgtagaagcaacaatcaggcactctaattacgaaaacctctctctgccatatcaaattggttgattgtctgttttttttttctgttttgccacaataattgtagtgcctacataaaatgggaaaaatgaaaacctttccataagaaaaagttcttggaataaacataattactacaggtgcattctttaatcaatgcacctttatctagcctccctcccttgaaatacaagtaaagatttattttgtcttc

SEQ ID NO: 50 - protein, 449 aa, Populus trichocarpa
MNPELTSPSSSSDRRISVLARHLVGVEMDPQNDSISAFPTSGSDSNSVFSHVVRGPEDPILGVTVAYNKDPSPVKLNLGVGAYRTEEGKPLVLNVVRKAEQLLVNDRSRVKEYLPITGLAEFNKLSAKLMFGANCPAIQENRVTTVQCLSGTGSLRVGAEFLAKHHHQRTIYIPQPTWGNHPKIFTLAGLSVKTYRYYDPATRGLNFQGLVEDLNSAPSGAIVLLHACAHNPTGVDPTSQQWEQIRKLMRSKGLMPFFDSAYQGFASGSLDADAQPVRMFVADGGELLLAQSYAKNMGLYGERIGALSIVCKTADVAGRVESQLKLVIRPMYSNPPIHGASIVAAILKDRDLYNEWTIELKAMADRIISMRQKLFEALHARGTPGDWSHIVKQIGMFTFTGLNSKQVAFMTKEYHIYMTSDGRISMAGLSSKTVPHLADAMHAAVKRVV

SEQ ID NO: 51 - DNA, 1556 bp, Poncirus trifoliata
ttctttgatttcttgaaagaaatttaatggattctgaatcagtgtttggaaagattgttcgtgctcctgaagatccgattctaggggtcactgttgcttataacaaggatacaagcccagtcaagttgaacttgggtgttggtgcttaccgaactgaggaagggaaacctctggttctgaatgtagtgagaaaggcagagcagctcttagtgaatgaccagtcacgggtcaaagagtatcttcccattgttggacttgcggattttaataaattgagtgcaaagctcatccttggtgctgacagccctgcgattaaagacaacagagtgaccaccgttcagtgcttgtctggcactggttctttgagggttggagctgagtttctggcaaggcattaccaccaacttaccatatatattccacagccaacatggggaaaccatcccaaagttttcactttagcaggattgtctgtgaagacctaccgctattatgatccagcaacacgtgggctaaacttccaaggcttgctggaggatcttagggctgcaccatcaggagctatagttcttcttcatgcatgtgctcataatccaactggtgttgacccgacccttgagcagtgggagcagatcaggcagctgatgaggtcaaaaggattgttacctttctttgacagtgcttatcagggttttgcaagtggtagcctagatgcagatgcacaatctgttcgcatgtttgtggcagatggtggtgaatgcctggtagctcagagttatgcgaaaaacatgggactctatggggaacgtgtcggcgccctcagcattgtctgcaagacagaagatgtggcaagcagggttgaaagccagttgaaactcgtgattaggcccatgtactctaatccacctattcacggtgcctctattgtggctacaattctcaaggacagcactatgtataaagagtggactcttgaactgaaagcgatggctgaccggattataagcatgcgtcagcaactatttgatgctctgtctgctagaggcactccaggagactggagtcacattatcaagcaaataggaatgtttacattcacagggctgaacagtgaacaagttgccttcatgaccaaggagtatcacatttatatgacatctgatgggaggattagcatggcaggtcttagttcaaagacagttcctcatcttacagatgctatacatgctgctgtaacccaaatgggctaaagattaatcagacaagaattcatgccgtaataattgtttgggtttcagtcatcctcagcaatgcaaaaatgagtttgtagaactagaaaatgcataaataaaggttttacattaagaaaattttgttcttttggttttggtgttgtattcttgtctttccaccaaaacttgacatgtttattaagcagaagaaaaacgaaagttgcgaggttatttatttttgcatttatctttggggagataccatttacatatttaactctccttgaaacgtttggtgactattttatagctggagttttagtt

SEQ ID NO: 52 - protein, 407 aa, Poncirus trifoliata
MDSESVFGKIVRAPEDPILGVTVAYNKDTSPVKLNLGVGAYRTEEGKPLVLNVVRKAEQLLVNDQSRVKEYLPIVGLADFNKLSAKLILGADSPAIKDNRVTTVQCLSGTGSLRVGAEFLARHYHQLTIYIPQPTWGNHPKVFTLAGLSVKTYRYYDPATRGLNFQGLLEDLRAAPSGAIVLLHACAHNPTGVDPTLEQWEQIRQLMRSKGLLPFFDSAYQGFASGSLDADAQSVRMFVADGGECLVAQSYAKNMGLYGERVGALSIVCKTEDVASRVESQLKLVIRPMYSNPPIHGASIVATILKDSTMYKEWTLELKAMADRIISMRQQLFDALSARGTPGDWSHIIKQIGMFTFTGLNSEQVAFMTKEYHIYMTSDGRISMAGLSSKTVPHLTDAIHAAVTQMG

SEQ ID NO: 53 - DNA, 1635 bp, Solanum lycopersicum
atcggccgaattgagagtaaacaaactttaaaaaggaaggcgtactgtagcaagcaaaagttccgtactactaaaatgcacacacaacaatcaccgtcaccctccgccgatcggaggttgagtgttctggcgaggcaccttgaaccgtcgtccgttgccgttgaaggtcatagcaaccactccattgtcggtgctcctacctcaggaaatgatggaaaacagtctgttttctctcatatcgttcgcgctcccgaagatcctattctcggcgttactgttgcatacaacaaagataccagccccatgaagttgaacttgggagttggtgcgtataggacagaggaaggaaaacctcttgttttgaatgttgttagacaagcagaacagctactagtaaatgataggtctcgcattaaagagtaccttccgatcactgggttggcagacttcaataaattgagtgctaagctgatacttggtgctgacagccctgctattcaagagaacagagtaacaactgtccagtgcttgtctggcacaggctcattgagagttgggggtgaatttttggctcaacactatcatcaacgtactatttatattccccaaccaacatggggaaaccacacaaaaattttcgctttagctgggttgtcagttaagagttaccgctactatgatccagcaacccgtggactccattttcaaggtttgttggaagaccttggatccgctccatcaggagcgatagtgttacttcacgcttgtgcacataaccccactggtgtggatccaaccaaagatcaatgggagcaaattaggagattgatgagatcaaaaggattgctacccttctttgatagtgcatatcagggctttgccagtggaagcctagatacagatgcacagtctgttcgcatgtttgtggcagatggaggtgaagtacttgttgctcaaagttatgcaaagaatatggggctttatggtgaacgtgtcggagctttaagcatagtgtgcagaaatgctgatgtaactagcagagttgagagccagttgaagttggtgattaggccaatgtattccaatccaccaattcacggtgcgtctatagttgctacaatcctcaaagacagaaacttgtaccatgaatggactcttgagttgaaagcgatggctgatcgaatcatcagaatgcgccagcaattatttgatgctttacgtgctaaaggtacccctggtgactggagtcacattatcaagcagattggaatgttcactttcacaggacttaacaaagaacaagtcgccttcatgaccaaagaataccacatctacatgacatcagatggacgcattagcatggcaggtctaagctccaggacagttccacacctgacagatgccatccatgctgctgtgactcgggctcgttgagttcactactggctactactgttttacatcatgttctctttaagttggccgagtatttcccgctcaagttaaaactcgattgcaattccccctccttgtaataactagtttcctctcctaagttggaggctataataaacctgtatctgtaatgtagaataaatatattttgcttaatgtagcaaaaccaattttcgttag

SEQ ID NO: 54 - protein, 452 aa, Solanum lycopersicum
MHTQQSPSPSADRRLSVLARHLEPSSVAVEGHSNHSIVGAPTSGNDGKQSVFSHIVRAPEDPILGVTVAYNKDTSPMKLNLGVGAYRTEEGKPLVLNVVRQAEQLLVNDRSRIKEYLPITGLADFNKLSAKLILGADSPAIQENRVTTVQCLSGTGSLRVGGEFLAQHYHQRTIYIPQPTWGNHTKIFALAGLSVKSYRYYDPATRGLHFQGLLEDLGSAPSGAIVLLHACAHNPTGVDPTKDQWEQIRRLMRSKGLLPFFDSAYQGFASGSLDTDAQSVRMFVADGGEVLVAQSYAKNMGLYGERVGALSIVCRNADVTSRVESQLKLVIRPMYSNPPIHGASIVATILKDRNLYHEWTLELKAMADRIIRMRQQLFDALRAKGTPGDWSHIIKQIGMFTFTGLNKEQVAFMTKEYHIYMTSDGRISMAGLSSRTVPHLTDAIHAAVTRAR

SEQ ID NO: 55 - DNA, 1659 bp, Saccharum officinarum
  misc_feature (1583)..(1583): n is a, c, g, or t
  misc_feature (1652)..(1652): n is a, c, g, or t
atttggttttctttgagcaccctgtgatggcagtcagttgcattctaaaaaaaaaaaaaaaaaccgttccccacgtcccccgatctcggttccctcgccccgcaccagcccgcaggcacgctcacgcgccgcgcaccggatggcccctgctatcgtgcgcgcggcgcaggcccccagcgccgaccgcaggttaagtacgctggtgcgccacctgctgccttcctccccacgaagaacagcagccgacacctccgccaccctcgaatcgttccccaccatggcgtcgcagggatcctcctccgtcttcgccgcactcgcgcaggccccggaggaccccatcctcggagtgaccgtcgcctacaacaaggatcccagccccgggaaggtcaacctcggcgtcggcgcctaccggaccgaggaagggaagcccctcgtgctgaatgtggtcaggcgcgccgagcaaatgttgatcaacaatccgtcacgtgtcaaggagtacctaccaatcactggtttggctgaattcaataagctgagcgctaagcttatctttggtgctgacagtcctgctattcaggagaatagggttgctacagtgcagtgcctatcgggtactggttctttaagagttggaggtgaatttcttgcaaggcactatcatgagcgcactatctacatcccgcaaccaacctggggaaatcacccgaaagtcttcaccttatctggattgactgttaggagctaccgctactatgatcctgcgacccgcggtcttgacttcaaaggactcttggaagacctcagttctgctccttcaggttcaattgtactgctgcatgcctgtgcccacaaccctactggagtagatcctaccattgatcagtgggaacagattaggcagctgatgagatcaaaatcactgcttccgttctttgacagtgcctaccaaggctttgcgagtggaagtcttgacaaagatgctcagtcagtgagaatgtttgttgctgatggtggtgaattgctcatggctcagagctacgctaagaacatgggattgtacggagagcgtgttggtgctttgagcattgtatgtggaagtgccgatgtagctgttagggttgaaagtcaactcaaacttgtgatcaggcctatgtattcaaacccccctcttcatggtgcctctatcgtggctaccatactcagggacagtgagatgttcaacgaatggactctagaactgaaggccatggctgataggatcattagcatgaggcaacagctatttgatgcgctgaaatccagaggaacccctggagattggagccacatcattaagcaaattgggatgtttactttcactgggctgaatagcgagcaagtggcattcatgaggcaggaataccacatttatatgacatccgatgggaggatcagcatggctggtttgagcatgaggactgtgccccatcttgcagatgccatacacgctgcagttactcaactgaaatgaggacagtatggcagctttcgtgaataaaatctgaatcacctactgtaatctgccttgaaataggagaatgttnttttactcttgtgttgaacagttttgactggcagattcaattcaaatattatggtcatatggtgcttcngaacctc

SEQ ID NO: 56 - protein, 456 aa, Saccharum officinarum
MAPAIVRAAQAPSADRRLSTLVRHLLPSSPRRTAADTSATLESFPTMASQGSSSVFAALAQAPEDPILGVTVAYNKDPSPGKVNLGVGAYRTEEGKPLVLNVVRRAEQMLINNPSRVKEYLPITGLAEFNKLSAKLIFGADSPAIQENRVATVQCLSGTGSLRVGGEFLARHYHERTIYIPQPTWGNHPKVFTLSGLTVRSYRYYDPATRGLDFKGLLEDLSSAPSGSIVLLHACAHNPTGVDPTIDQWEQIRQLMRSKSLLPFFDSAYQGFASGSLDKDAQSVRMFVADGGELLMAQSYAKNMGLYGERVGALSIVCGSADVAVRVESQLKLVIRPMYSNPPLHGASIVATILRDSEMFNEWTLELKAMADRIISMRQQLFDALKSRGTPGDWSHIIKQIGMFTFTGLNSEQVAFMRQEYHIYMTSDGRISMAGLSMRTVPHLADAIHAAVTQLK

SEQ ID NO: 57 - DNA, 1800 bp, Triticum aestivum
gcacgagccacgtccgcgcccctcgattccacagcaagcacccaacacgccgcacgcggcacgcgcccgagacgctcgtacgggccggcgcaccctagccgggccgcgatgcccacggctaacgtgcgcgcggcgcagcctggcgccgaccgcaggttaagtacgctggtgcgccacctgctgccttcttccccacgaacatcagcagcgaccgccacctccgccgactcctccctccaacctttccccaccatggcgtcgccctccgtcttcgccgggatcgcgcagggcccggaggaccccatcctcggggtgacggtcgcgtacaacaaggatcccagccccgtcaaggtcaacctcggcgtcggcgcctaccggaccgaggaagggaagcccctcgtgctgaatgtggtcaggcgcgccgagcagatgctgatccaaaacgagtcacgtgttaaggagtacttgccgatcactggattggccgatttcaacaagttgagtgctaagcttatcttcggtgctgacagtcctgctattcaggagaatagggtggctacagtgcagtgcttatcaggaactggttccctacgagtgggaggtgaatttcttgcaaggcactatcatgaacgcactatctacatcccccagccaacctgggggaatcacccaaaagtcttcactttagctggcctgactgctaggagttaccggtactatgatcctgcaactcgtggactggatttccaaggactcttagaagacctcagttcagctccctcaggcgcaattgtactgcttcatgcatgtgcccacaaccctactggtgtcgacccaaccttggaacagtgggaacagatcaggcagctgatgagatcaaaagcattgctgccattctttgacagtgcttatcaaggatttgcaagcggaagccttgacaaagatgcccaatcagtgcgcatgttcgtcgctgatggtggtgaattgctcatggctcaaagctacgccaagaacatgggattgtatggagagcgtgttggtgctttaagcatcgtttgtgggagtgctgatatagctgttaaggttgaaagtcaacttaagcttgtaattaggcctatgtattcgaaccctcctcttcatggtgcttctatcgtggctaccatacttaaggacagtgctatgttcgacgaatggactctggagctgaaggccatggctgataggataattagcatgagggagcagctttttaatgcgctgaaaatcagggaaacacctggagattggtcccacatcattaagcagattgggatgtttactttcactgggctcaacagtgatcaagtagccttcatgaggcaagaatatcacatttacatgacatctgatgggaggatcagcatggccggtttgagctccagaactgtaccccatcttgcagatgccatacatgccgcagtaacaaaactgaagtgaatgataacattgcaaccccctcgcacaataaaatcttgaattctctacagcagtttccgaggggttcaaccagaggtgtgttactggctgaactcgagaatttgccttgtagactcattaaacttgttgtctgagacagttttgtacacaccggattaaagattatggtgatttcgaatcccgaataagctgcagttgtgatgcttttcttacccttgaatgctgaggtatttatcctgcagcgctgtataatgcctagttttgggaagctaatgtttgtgagctgtatgtgcgttttcggttgttgcatacggtgcttttagt

SEQ ID NO: 58 - protein, 455 aa, Triticum aestivum
MPTANVRAAQPGADRRLSTLVRHLLPSSPRTSAATATSADSSLQPFPTMASPSVFAGIAQGPEDPILGVTVAYNKDPSPVKVNLGVGAYRTEEGKPLVLNVVRRAEQMLIQNESRVKEYLPITGLADFNKLSAKLIFGADSPAIQENRVATVQCLSGTGSLRVGGEFLARHYHERTIYIPQPTWGNHPKVFTLAGLTARSYRYYDPATRGLDFQGLLEDLSSAPSGAIVLLHACAHNPTGVDPTLEQWEQIRQLMRSKALLPFFDSAYQGFASGSLDKDAQSVRMFVADGGELLMAQSYAKNMGLYGERVGALSIVCGSADIAVKVESQLKLVIRPMYSNPPLHGASIVATILKDSAMFDEWTLELKAMADRIISMREQLFNALKIRETPGDWSHIIKQIGMFTFTGLNSDQVAFMRQEYHIYMTSDGRISMAGLSSRTVPHLADAIHAAVTKLK

SEQ ID NO: 59 - DNA, 1810 bp, Volvox carteri
aggtcctttctcagtagcaaaagtaggcgtgcaacatcgccctcactatcgctctcgaaaaggagctgctatcttcgttttcgttccgtaattccctacctcgcgcagaatcatgagccctgaagaccgcatggaagtgctgacaaggcagttgtgtgcaggtcaatcgactgagagtaactgggagcatgtccagcaggcacccccagatcccattatcggtgtcacagatgcttggcgcgccgaccccgacccccgaaaacttaaccttggcgtgggagcctaccgaacggaggagggcaagccgtacgtcctgaaagccgtacgagaagcggagcagcagatccttgccgaccctgccatgaacaaggagtaccttccaatctccggcaaccctgagttcaaccgactggcccgcactctggccctcgggcctggcagctccgccatccagcagaaccgagtggccaccgtgcaggccttgtcgggcaccggcgcgctccgagttggtgctgagtttttgtcgatgcacttgcccgcctccataccgcgcatcgtgtatctgcccaatcccacctggggcaaccacaagagcatcttcgccaaggcgggattccaggttcgcgaatatcgctacttcgacgcggccactcgcggtctgaacttcgcgggtatggtggcggatgtgtcggcggcgcctcccggctcggtgctactactacacgcgtgtgcacacaaccccacgggtgtagatccctccccggagcagtggtctcggctgctggaggtggcacggtcgggaggactcgtgcccttctttgacatggcgtaccagggtttcgccagcggtgatctggatgcggatgcggcatctgttcggctgttcctggaggcaggtctggagctggtgctggctcagtcgttcgccaaaaacatggggttgtacggcgagcgcgccggcgctctcagcgtcgtgagcaagacaaaggaagttgccactcgagtggagtcgcagctcaagctcgtcgtgcggcccatgtactccaacccaccaatgcacggagctgccattgccgcacgcgtcatgggcgatcccaagctgaacgcgctgtggaaggaggagcttcgcggcatggccgagcgtatcaagtccatgcgccaggtgctgtacgaccaactggtggctcgcaacgtgccgggggattggagctttgtgctgaagcagattggcatgttcagctttacagggatgacgcggcaccagtgcgagcagctggtcagcaagtggcacgtgcacctcactctggacggcaggatttcgatggcgggattgtcagcggcaaccgcgccctatctggcagaggccattgcggacgtaattcagaacgcttagataaagatggtaaaatgaggggtgctgcgcgatgttgccatggtggttgaggacgcggcgggagaggatgcgctaggtggcgccctgccatcggttggcactctggtcgttcggtttatgatttgggtacgtgccgtgggcaagcaaacattttgttcgtttgcggtccttgtcatgcccgaccagcagtcgttaaatatttattttctttgcttgtcacgatagcgcgatatgtctctttagtctagaaccccctgtcttgcgtttggaaatgtcgtgcaatagaacacgttccttcattacccggtgcgagacgcgtgcgagactgtaccgggaaagaacgggtttgtgtcactgttgcgacatatagtcacggatgccgttttaaattactaaagttgtaatgcagtgtagtac

SEQ ID NO: 60 - protein, 426 aa, Volvox carteri
MSPEDRMEVLTRQLCAGQSTESNWEHVQQAPPDPIIGVTDAWRADPDPRKLNLGVGAYRTEEGKPYVLKAVREAEQQILADPAMNKEYLPISGNPEFNRLARTLALGPGSSAIQQNRVATVQALSGTGALRVGAEFLSMHLPASIPRIVYLPNPTWGNHKSIFAKAGFQVREYRYFDAATRGLNFAGMVADVSAAPPGSVLLLHACAHNPTGVDPSPEQWSRLLEVARSGGLVPFFDMAYQGFASGDLDADAASVRLFLEAGLELVLAQSFAKNMGLYGERAGALSVVSKTKEVATRVESQLKLVVRPMYSNPPMHGAAIAARVMGDPKLNALWKEELRGMAERIKSMRQVLYDQLVARNVPGDWSFVLKQIGMFSFTGMTRHQCEQLVSKWHVHLTLDGRISMAGLSAATAPYLAEAIADVIQNA

SEQ ID NO: 61 - DNA, 1236 bp, Vitis vinifera
atgaattctcagcacccagatggctctgtcttctccaacatcgttcgtgctcctgaggatcccattcttggggtcactgttgcttataacaaggataccagcccaatcaagttgaatttgggtgtgggtgcttatcgaacagaggaaggaaaaccccttgttttgaatgtagtgagacgagccgaacagctgttggttaatgacccgtcccgggtcaaagagtaccttcccattgttggactggcagagttcaataaattgagcgctaaactcatttttggtgctgacagcccggctatccaagaaaatagagtagctactgtccagggtttgtctggtactggttcactgagaattggagctgagtttctggcaaggcattactaccagcatacaatttacattccagtgccaacatggggaaaccatccaaaaattttcaccatagcggggttgtctgtgaagacttaccgctactatgacccagaaacacgtgggctagacttcaaaggactgttggaggaccttggtgcagcgccaacaggagcaattgtgcttcttcatgcatgtgctcataaccccactggtgttgatccaactcttgagcagtgggagcagatcagacagttgatgagatcaaaagggttgttacctttttttgacagtgcttatcagggatttgcaagtggtagtttggatgcagatgcccagtctgttcgaatgtttgttgcagatggtggtgaatgccttgcagctcagagttatgcaaaaaacatgggactctatggggaacgtgttggtgcccttagcattgtctgcaaggcagcagacgtggcaagcagggttgagagccagctgaaacttgtgatcaggcccatgtattccaatccccctattcatggtgcatctattgtggctacaatcctcaaggacagtgatatgtataatgaatggactctggagctaaaagcaatggcggaccggattatcagcatgcgtcaactactgtttgatactttacgtgatagaggcacccctggcgactggagtcacattataaagcaaattggaatgttcactttcacagggctgaatactgagcaagtcgccttcatgaccaaggaatatcacatctacatgacatctgatgggaggattagtatggccggccttagttcgaggacggtccctcaccttgctgatgctatacatgctgctgttacccgaattccctag

SEQ ID NO: 62 - protein, 411 aa, Vitis vinifera
MNSQHPDGSVFSNIVRAPEDPILGVTVAYNKDTSPIKLNLGVGAYRTEEGKPLVLNVVRRAEQLLVNDPSRVKEYLPIVGLAEFNKLSAKLIFGADSPAIQENRVATVQGLSGTGSLRIGAEFLARHYYQHTIYIPVPTWGNHPKIFTIAGLSVKTYRYYDPETRGLDFKGLLEDLGAAPTGAIVLLHACAHNPTGVDPTLEQWEQIRQLMRSKGLLPFFDSAYQGFASGSLDADAQSVRMFVADGGECLAAQSYAKNMGLYGERVGALSIVCKAADVASRVESQLKLVIRPMYSNPPIHGASIVATILKDSDMYNEWTLELKAMADRIISMRQLLFDTLRDRGTPGDWSHIIKQIGMFTFTGLNTEQVAFMTKEYHIYMTSDGRISMAGLSSRTVPHLADAIHAAVTRIP

SEQ ID NO: 63 - DNA, 1353 bp, Vitis vinifera
atgtaccagcaattctcttcacccgccgatcggaggttgagtgctctggcccggcacctggagggctcgtccccatcgtccaccatggaccctaaccacacgatctctgcttctgcaacctcgggctccgatttcggtggctctgtttttgatcacgtcgttcaggctcctgaagatcccattctaggggtgactgtggcctacaacaaagatcctagcccagtgaaactgaacttgggcgttggtgcttatcgaacagaggaaggaaagcctcttgttctgaatgtagtgagacgggcagagcagctgcttgttaatgacaggtcccgggtcaaagaatatcttcctattgttgggctggcagaattcaataaattgagtgctaagctcatgtttggcgctgacagccctgctattcaggtgaagagggttactactgtccagtgtttgtctggtaccggctcattgagagttggagctgagtttttggcgagacatcatcaccaacgaaccatatacattccacaaccaacatggggaaaccatggaaaaattttcacattagcagggttatctgtgaagacttaccgctattatgatccagcaacacgtgggctgaacttccaaggcttgttggaagaccttagtcttgccccttctggagcaattgtgcttcttcatgcatgcgctcacaaccccactggtgtcgacccaacccttcagcaatgggagcagataaggcagttgataagattgaaagggttgttacctttctttgacagtgcttaccagggttttgcaagtgggagtctggatgcagatgcgcagtctgttcgcatgtttgttgctgatggtggtgaatgccttgctgctcagagttatgccaagaacatggggctctacggggaacgtgttggtgcactgagcattgtttgcaagacggcggatgtggcaagcagggttgagagccaggttaaacttgtgatcaggcctatgttttcaaacccacccattcatggtgcatctatcgttgcaatcatcctgaaaaacagggatatgtacaatgaatggactgttgagttgaaggcaatggcagatcgtattatcagcatgcgccagcaactctttgatgctttacgggccagaggcacaccaggtgactggaatcacattctcaagcagattggaatgtttactttcacaggattgaacaccgctcaagtggccttcatgaccaaagagtaccacgtctacatgacatctgatgggaggatcagcatggcaggtctgagctccaagacagtccctcatcttgcagatgctatacatgccgccgtcacccgtgctatctaa

SEQ ID NO: 64 - protein, 450 aa, Vitis vinifera
MYQQFSSPADRRLSALARHLEGSSPSSTMDPNHTISASATSGSDFGGSVFDHVVQAPEDPILGVTVAYNKDPSPVKLNLGVGAYRTEEGKPLVLNVVRRAEQLLVNDRSRVKEYLPIVGLAEFNKLSAKLMFGADSPAIQVKRVTTVQCLSGTGSLRVGAEFLARHHHQRTIYIPQPTWGNHGKIFTLAGLSVKTYRYYDPATRGLNFQGLLEDLSLAPSGAIVLLHACAHNPTGVDPTLQQWEQIRQLIRLKGLLPFFDSAYQGFASGSLDADAQSVRMFVADGGECLAAQSYAKNMGLYGERVGALSIVCKTADVASRVESQVKLVIRPMFSNPPIHGASIVAIILKNRDMYNEWTVELKAMADRIISMRQQLFDALRARGTPGDWNHILKQIGMFTFTGLNTAQVAFMTKEYHVYMTSDGRISMAGLSSKTVPHLADAIHAAVTRAI

SEQ ID NO: 65 - DNA, 1839 bp, Zea mays
acccggcttgcgcacgccgttcacgtcccccggcccccgctctcgtttcccccgcccgcaccaggcacgctcacgcgctgcgcaccggatggcccctgctaacgtgcgcgcggcgcaggcgcaggcccccagcgccgaccgcaggttaagtacgctagtggggcacctgctgccttcctccccacgaagagcagcagcagacacctccgccacctccaccctcgaatcgttccccaccatggcgtcgcagggatcctccgtcttcgccgcactcgagcaggccccggaggaccccatcctcggagtgaccgttgcctacaacaaggatcccagccccgtgaaggtcaacctcggggtcggcgcctaccggaccgaggaagggaagcccctagtgctgaacgtggtcaggcgcgccgagcaaatgttgatcaataatccgtcacgtgtcaaggagtacctaccaatcaccggtctggctgaattcaataagctgagcgctaagcttatctttggcgctgacagccctgctattcaggagaatagggttgctaccgtgcagtgcctatcgggtactggttctttaagagtcggaggtgaatttcttgcaaggcactatcacgagcgcactatctacatcccacaaccaacctggggaaatcacccaaaagtcttcaccctatctggcttgaacgttaggagctaccgctattatgatcctgcaacatgcagccttcacttcgaaggactcctggaagacctcggttctgctccttcaggttcaattgtactgctgcatgcctgtgctcacaaccctactggagtagatcctaccatcgaacagtgggaacagattaggcagctgatgagatcaaaatcactgcttccgttctttgacagtgcctatcaaggctttgcaagtggaagtcttgacaaagatgctcagtcagtgcgtatgtttgttgctgatggtggtgaacttctcatggctcagagctacgctaagaacatgggattgtatggagagcgtgttggcgctttgagcattgtatgtaaaagtgccgatgtagctgttagggttgaaagtcaactcaaacttgtcatcaggcctatgtattcaaaccctcctcttcatggtgcctctatcgttgctaccatactcagggacagcgagatgttcaacgaatggactctggaactgaaggccatggctgataggatcattaacatgaggcaacaactatttaatgcgctgaaatccagaggaacccctggtgattggagccatatcattaagcaaattgggatgtttactttcactgggctgaatagcgaacaagtcgcattcatgaggcaggaataccacatttatatgacatctgatgggaggatcagcatggccggtttgagcatgaggactgtgccccatcttgcagatgccatacacgctgcagttactcaactgaaatgaggatagtatcgcagctttcgtgaataaaacctgaatcacccacaacaatgttctaagtactcagccagtggtatttactggttgacctactgtagtttgcgtcggaatagatatgtttttttactcttcgtggggcagttttgtactggtggattcataaggactctgattatggtgcgttcggaacttataataataagcacatgaaattttgcttcaggtgcagtgatgctgtctcattaagttattagttattaggttgctgtcttattaagttatcaggtcgcagctgggttgaagcggagcacctagtcttgatttatctcttctcttttctagagagcttctgtcattcgtgttgccctttttaa

SEQ ID NO: 66 - protein, 459 aa, Zea mays
MAPANVRAAQAQAPSADRRLSTLVGHLLPSSPRRAAADTSATSTLESFPTMASQGSSVFAALEQAPEDPILGVTVAYNKDPSPVKVNLGVGAYRTEEGKPLVLNVVRRAEQMLINNPSRVKEYLPITGLAEFNKLSAKLIFGADSPAIQENRVATVQCLSGTGSLRVGGEFLARHYHERTIYIPQPTWGNHPKVFTLSGLNVRSYRYYDPATCSLHFEGLLEDLGSAPSGSIVLLHACAHNPTGVDPTIEQWEQIRQLMRSKSLLPFFDSAYQGFASGSLDKDAQSVRMFVADGGELLMAQSYAKNMGLYGERVGALSIVCKSADVAVRVESQLKLVIRPMYSNPPLHGASIVATILRDSEMFNEWTLELKAMADRIINMRQQLFNALKSRGTPGDWSHIIKQIGMFTFTGLNSEQVAFMRQEYHIYMTSDGRISMAGLSMRTVPHLADAIHAAVTQLK

SEQ ID NO: 67 - DNA, 2241 bp, Chlamydomonas reinhardtii
tcgatactgtgatcttgaattccttgaacagtccatctcgttagacgccaacaacaatgcagctccaggcgcgcatgcaattgcgttcggccggcccccgccgcgccgggcccgtgccggtccgcgccatggcgggcagccgcttcgctgacgtggcgcaggcgccgcccgaccccatcctgggcgtgagcgaggcgttcaaggcctccaccgaccccaacaagctcaacctgggcgtgggcgcctaccgcgacgagcagcttaagcccgtggtgctcagcgtggtcaagaaggcggagtcgaagatcttctcccgcaacgagaacaaggagtacctgaccattgagggcctggacgccttccgcaaggccaccgtggacctgttgctgggcggagaccaccccgccatcaaggagggccgtgtggctgtggtgcagtcgctgtcgggcacgggcagcctgcgtgtgggcgcggccttcattgcgcgcttcatgaagggcgccaccgtctacctgtccaaccccacctggggcaaccaccgcaacatctttggcgacgagggcgtggagtggaagtactaccgctactttgacgccgacacggtgggcctggacttccgcggcatggtgcaggacctgcaggccgcgccgcccggctccgtggtggtgctgcacggctgcgcgcacaaccccactggtattgaccccaccaaggaccagtgggcggccattgcggacctgtgcaaggagcgcaacctcatgcccttctttgacgtggcgtaccagggctttgccaccggcgacctggacaaggacgcctacgcgccgcgcctgtttgtggagaaggggctggagattgtggtgtcgcagtcctactccaagaacctggggctgtacggcgagcgcgtgggggcgctggtcatggtgctcaacgacaaggaggccgccacccgctgcctgagccagctgaagcgcctggcccgtgcgctgtactccaacccgcccacccacggcgcgcgcatcgccgccgaggtggtgaacgacaaggagctgttcgaggagtggaagggcgagatgcgcggcatggccggccgcatcgagcgtgtgcgcggcgagctgcagcgttcgctggagagcaagtaccccagcaaggactggagcttcatcaccaagcagatcggcatgttcagcttcaccggcctcacgcctgcacaggtggacaacatgaccaacaagcatgccatcttcatgacccgcgacggccgcatcagcctggccggcctcaacagcgccaaggtggactacctggcggaggccattgtggacagcgtgcgcaaccactagaggaggcggacaccaggtgatattggaggtgatactggaggtgctaaggggtgctatgaagtgctgggtgtaggtcaggcgggaaagcggcgcgcagcacgcgcggcgcttgaatggagcctgcgaggcaagcggcgaggagcgccagtggcaaggctctggcggcagcggcaggccttcgatgcctgaatatgtagtgctagagcagtgctggaggcagcaggggagcacggacatttggcctaagggctgatgcatttgtccaggcgtgaggcgtggctatcggacacggactgcctatcttgctgggagtctcgggctagggccgcacctactggacgcggcttcccctcccaagagcacgtttcctcgccaagaggaagcgttgtggggcggcctttgtaccatgatttgtcgtgcgggcaagaaccataaagaataagtggtgggtggcggatgggcagcagtcggatttcggtgtggagcaagaacgccggacacacgtctggagggcacgattcgtgagtgacgttggtatgctgcacggacatattaactaagggatatgaccacgagcctggattcaaactacggtgtagacgctgtggatgtgcaaggattcggtgcagcgagcactggttggggttgtgaagtgcgggctgcacgcaacatggcgcaactgttgccggcctgggctccgcatgttgctagcatggagcaggtgtcaacattaagtgtgcttgcaaacgatgattgctgccatagctgcagatggcaagagtcacgttaggtgggtggcggggagcggcacagggggcccgcgggggtaaacgcctgcaaggagcacctggtccacataaagcgttgcaacagcccaaatgcagacatgttatttgaa

SEQ ID NO: 68 - protein, 428 aa, Chlamydomonas reinhardtii
MQLQARMQLRSAGPRRAGPVPVRAMAGSRFADVAQAPPDPILGVSEAFKASTDPNKLNLGVGAYRDEQLKPVVLSVVKKAESKIFSRNENKEYLTIEGLDAFRKATVDLLLGGDHPAIKEGRVAVVQSLSGTGSLRVGAAFIARFMKGATVYLSNPTWGNHRNIFGDEGVEWKYYRYFDADTVGLDFRGMVQDLQAAPPGSVVVLHGCAHNPTGIDPTKDQWAAIADLCKERNLMPFFDVAYQGFATGDLDKDAYAPRLFVEKGLEIVVSQSYSKNLGLYGERVGALVMVLNDKEAATRCLSQLKRLARALYSNPPTHGARIAAEVVNDKELFEEWKGEMRGMAGRIERVRGELQRSLESKYPSKDWSFITKQIGMFSFTGLTPAQVDNMTNKHAIFMTRDGRISLAGLNSAKVDYLAEAIVDSVRNH

SEQ ID NO: 69 - DNA, 1691 bp, Centaurea Solstitialis
tacatcttctacatcatcatattgcatcgtccatagtcaaactcactctccgttccctcagtcttgacacgtccacacatggacttcagccttgatatccttcccataagtctttatttccgcagccatgtctttgcaaaacaagtgcaaggacacaatgaactctgaaaactccttccaaagtgccttctttggaaaggaaaaaggacccctctctacgaaaacaaagtctcacggtcggataacgatggctgtagctgtcaatgcttcacgatttgataacattacaatggctcctccagatcctattcttggagtttctgaagcattcaaagctgacacagatgaaatgaagctcaaccttggtgttggagcatatcgtacggaagaacttcagccctatgtgctcaaagttgtcagaaaggctgaaaatcttatgctggaaaggggagaaaacaaggagtatcttcctatcgaaggtttggcttcattcaacaaagccacagctgagttgttgtttggagcagataatccagtccttcatgaacagagagttgccaccattcaaggtctctcaggcactggctcccttcgaattgctgcggcactaattgagagatacttccctggagcaaaagttataatatcatctccaacttggggaaatcacaagaatattttcaatgatgctaaagttccttggtccgagtatcggtactatgatccaaaaacagttggcctagattttgatgggatgattgcggacataaaagctgctcccgaaggatccttcgtgcttcctcatggctgtgctcacaatccaacaggcattgatccaacccctgaacagtgggagaaaattgctgatgtcattcaagagaaaaaccatattccattcttcgatgttgcttatcagggatttgccagtggaagcctagaccaagatgcatcgtctgtgaggttgtttgctgcccgtggaatggagcttttagttgcacaatcatatagtaaaaatctaggtctatatgccgagagggttggagcaattaatgtactatgctcatcagccgatgcagctgtgagggtgaagagccagatgaaaagaattgccaggccaatgtactcaaacccaccggttcatggggcacggatcgttgctaatgttgtagggaacccagatttctttaacgagtggagagcggaaatggaaatgatggcgggaaggatcaaaagcgtgagacaaaagctatacgataacctctgtgctaaggataagagcggaaaagactggtcttttgttcttaagcagattggcatgttttcttttaccggtctcaacaaagctcagagcgataacatgactgataaatggcacatttacatgacaaaagatggaagaatatcgttggctggtttatctgctgcaaaatgcgagtatcttgccgatgccatcattgattcctaccacaatgtgagctagaaactgcataacttatcattaaaaaccatcaataatttgaatgagagatgaggcttgttcattctagatataattttgcagaaatgttgtaactttcttttttggtagaaaacccttgtagctgaataaaatttacatacaagccctgtttgcttccctttgggttcgggaagaaggcatatgttaagctaccataattatgattttttgc

SEQ ID NO: 70 - protein, 450 aa, Centaurea Solstitialis
MSLQNKCKDTMNSENSFQSAFFGKEKGPLSTKTKSHGRITMAVAVNASRFDNITMAPPDPILGVSEAFKADTDEMKLNLGVGAYRTEELQPYVLKVVRKAENLMLERGENKEYLPIEGLASFNKATAELLFGADNPVLHEQRVATIQGLSGTGSLRIAAALIERYFPGAKVIISSPTWGNHKNIFNDAKVPWSEYRYYDPKTVGLDFDGMIADIKAAPEGSFVLPHGCAHNPTGIDPTPEQWEKIADVIQEKNHIPFFDVAYQGFASGSLDQDASSVRLFAARGMELLVAQSYSKNLGLYAERVGAINVLCSSADAAVRVKSQMKRIARPMYSNPPVHGARIVANVVGNPDFFNEWRAEMEMMAGRIKSVRQKLYDNLCAKDKSGKDWSFVLKQIGMFSFTGLNKAQSDNMTDKWHIYMTKDGRISLAGLSAAKCEYLADAIIDSYHNVS

SEQ ID NO: 71 - DNA, 1686 bp, Carthamus tinctorius
gcgggggctctcgattgcatcgctcacccactcttcttcttcatcatcttcatcgccatagtcaaaatcacactccttctctccgtcggaacttcacagatggcttcggcattgctttctttcccatcagtctctacgtctgctgccctgtctttgcaagacaagtgcaaggacaaaatgaagtctggaagctctttccaaagtgccttctttggaaaggaaaaacaacccctctctatgaaaacgaagtctcatggtcgtataacgatggctgtagctgtcaatgcttcacgatttgatagcattacaatggctcctcccgatcctattcttggagtttctgaagcattcaaagctgacacagatgaaatgaagctcaaccttggtgttggagcatatcgtacagaagaacttcagccctatgtgctcaaagttgttagaaaggctgaaaatcttatgctggaaaggggagaaaacaaggagtatcttcctatcgaaggtttggcatcattcaacaaagccacagctgagttgttgtttggagcagataatccagtccttcatgaacagagagttgccaccattcaaggtctctcaggcactggctcccttcgaattgctgcggctctaattgagagatacttccctggagcaaaagttctaatatcatctccaacttggggcaatcacaagaatattttcaatgatgctagagttccttggtctgagtatcggtactatgatccaaaaacagttggcctagattttgatgggatgattgctgacataaaagctgctccagaaggatccttcgtgcttcttcatggctgtgctcacaatccaacaggcattgatccaactcctgaacagtgggagaaaattgctgatgtcattcaagagaaaaaccatattccattcttcgatgttgcttatcagggttttgctagtggaagcctagaccaagatgcatcgtctgtgaggttgtttgctgcccgtggaatggagcttttagttgcacagtcatatagtaaaaatctaggtctttacgccgagagggttggagcaattaatgtcctatgctcatcagccgatgcagctgtgagggtgaagagccagatgaaaagaattgccaggccaatgtactcaaacccaccggttcatggggcacggatcgttgctaatgttgtagggaacccagatttctttaacgagtggagagaggaaatggaaatgatggcgggaaggatcaaaagcgtgagacaaaagctatacgataacctctgtgccaaggataagagcggaaaagactggtcttttgttcttaagcagattggcatgttttcttttactggtctcaacaaagctcagagcgataacatgactgataaatggcacatttacatgacaaaagacggaagaatatcattggccggtttatctgctgcaaaatgcgagtatcttgccgatgccatcattgattcgtaccacaatgtgagctagaaaaaaacaatctttaaaaagcatcaataatttgaatgagatgtgaggcttatttattctggacataattttgcagaaatgttgtaacttttttgttggtagaaaacccttgtagctgaataaaatttacatacaaaccctgtttgcctccctttttgttggggaaggcatatgttggttgccatg

SEQ ID NO: 72 - protein, 466 aa, Carthamus tinctorius
MASALLSFPSVSTSAALSLQDKCKDKMKSGSSFQSAFFGKEKQPLSMKTKSHGRITMAVAVNASRFDSITMAPPDPILGVSEAFKADTDEMKLNLGVGAYRTEELQPYVLKVVRKAENLMLERGENKEYLPIEGLASFNKATAELLFGADNPVLHEQRVATIQGLSGTGSLRIAAALIERYFPGAKVLISSPTWGNHKNIFNDARVPWSEYRYYDPKTVGLDFDGMIADIKAAPEGSFVLLHGCAHNPTGIDPTPEQWEKIADVIQEKNHIPFFDVAYQGFASGSLDQDASSVRLFAARGMELLVAQSYSKNLGLYAERVGAINVLCSSADAAVRVKSQMKRIARPMYSNPPVHGARIVANVVGNPDFFNEWREEMEMMAGRIKSVRQKLYDNLCAKDKSGKDWSFVLKQIGMFSFTGLNKAQSDNMTDKWHIYMTKDGRISLAGLSAAKCEYLADAIIDSYHNVS

SEQ ID NO: 73 - DNA, 1985 bp, Gossypium hirsutum
gttatggacactcatcaacacaacatcggacacgatcgtgaatcatgaaccctaaagatcttaatcaacgtcaactaatggtaaagccgcttatgagctgaaaagtggcaaacgactatacccctaaagacgatttcatcacagtgcacacacacagtctctaccagctcgatcccaacggcagagcatttcacagtgttttggctgaaaaaatcaaaaacccattttgatcgccaacaccaccaccaaagttttcgccttgatcccatcgcccccttttgcctctactaaaccccttatctctaatccttgctattaccaatttgttgatttcattatggcttccacactgctctctttggcttctgccactccctctgcttcactttgttttcatgaaattaacaagggaaaattgaatcttgggtgcatcaacaaggaaaaaaccaatcctttcatcaaagcaaagtcttttggtcgagtctctatggttgtggcttccaatgtgtctcatttcgagggtattacaatggctccccctgatccaattcttggggtgtctgaagctttcaaagcagacgaccatgagttgaaactcaaccttggtgttggagcctatagaactgaagagctacagccttatgtgcttgatgtggttaaaaaggcagataagcttctactcgagaaaggggaaaacctagagtatctcccaattgaaggcttggctgctttcaataaagtgacggcggagttgttatttggagcggacaatccagttataaagcaacaaagggttgcaacggttcaagggctttcgggaaccggttcacttcggctggctgcagctctcatagaacgatattttcccggggcaaaagttctaatatcatctcctacatggggtaaccacaagaacattttcaacgatgctagggttccatggtcggaataccgatattacgacccgaaaacagttggtttggattttgaagggatgatagcggacatcaaggcagctcctgagggatcttttattcttcttcatggttgcgctcacaacccaactggtatcgatccaactcctgaacagtggggagtaattgcagatgttatccaagagaagaaccatattccatttttcgatattgcataccaggggtttgcaagtggaagcctggacaccgatgcagcgtctgtgaggatgttcgtggcccgcggtatggaggttattgctgctcaatcatacagtaaaaatctcggcctatatgcagaaaggattggagcaatcaatgttgtttgctcatcaccagaggcagctgcaagggtaaagagccaactgaaaagaatagctcgaccaatgtactcgaatcctcctgttcatggggcaagaattgtcgccaacattgttggggattcagctctcttcaaggaatggaatgctgagatggaaatgatggcagggagaatcaagaatgtgagacataaattgtttgatagtctttcttccaaagataaaagtgggaaggattggtctttcgttcttaagcagatcgggatgttttcgttcacaggcttaaacaaagctcagtgcgataatatgacaaacaagtggcatgtttatatgaccaaggatggaaggatatcacttgcaggattatctttggctaagtgtgaatatctagcagacgccatcattgactcataccacaatgtgagttaacaagataatgaaaaattttactaaaaaaaacatgttgtaataatgtgtttaaactgagcattaaaagaactcttgaatttagagatttgatggaggctggtttttgctgcctcttccttttaattttgctcaaagtgggggaattttgaagttctattgattgtatgacaataaatcatttatgaagtaactgaaaactaggggattagctatatctatatatttatttatttattttaagtgttttattgagttgatgtcattg

SEQ ID NO: 74 - protein, 460 aa, Gossypium hirsutum
MASTLLSLASATPSASLCFHEINKGKLNLGCINKEKTNPFIKAKSFGRVSMVVASNVSHFEGITMAPPDPILGVSEAFKADDHELKLNLGVGAYRTEELQPYVLDVVKKADKLLLEKGENLEYLPIEGLAAFNKVTAELLFGADNPVIKQQRVATVQGLSGTGSLRLAAALIERYFPGAKVLISSPTWGNHKNIFNDARVPWSEYRYYDPKTVGLDFEGMIADIKAAPEGSFILLHGCAHNPTGIDPTPEQWGVIADVIQEKNHIPFFDIAYQGFASGSLDTDAASVRMFVARGMEVIAAQSYSKNLGLYAERIGAINVVCSSPEAAARVKSQLKRIARPMYSNPPVHGARIVANIVGDSALFKEWNAEMEMMAGRIKNVRHKLFDSLSSKDKSGKDWSFVLKQIGMFSFTGLNKAQCDNMTNKWHVYMTKDGRISLAGLSLAKCEYLADAIIDSYHNVS

SEQ ID NO: 75 - DNA, 1754 bp, Glycine max
gtttccttcatcttcttcttcttcttctatctctctacaacacacttttttaagtgattcgttcgcagaaacatggcttcttcgtttctatccgcagcttcgcacgctgtctcaccctcttgttctctgtccaccacgcacaagggaaagcccatgcttggaggcaacactttgagatttcacaaaggacccaattccttctctagttcaaggtctagaggtcggatctctatggctgttgcagttaatgtatctcggtttgaaggcatacctatggctcctcctgatccaattctcggagtttccgaggcgtttaaggcagacaatagtgatgtcaagctcaatcttggagttggggcatacagaacagaagaactacagccatatgtgcttaatgttgttaagaaggcagagaatcttatgctggagagaggggataacaaagagtatctcccaattgagggtttggcagcatttaataaggcaactgcagagttgttactcggagcagacaacccagcaatcaaacagcaaagagttgccactgtccaaggtctttctggaactggttctctgcgactaggtgcagctctgatagagcgatattttcctggggcaaaagttttgatatcagctcctacctggggtaatcacaagaatattttcaatgatgctagtgtcccatggtctgagtaccgatattatgatcccaagacagttgggttggattttgagggcatgattgaagatataaagtcagctccggaaggatcttttatcttacttcatggatgtgctcataatcctactggtattgatccaacacctgaacagtgggaaaaaatagctgatttaattgaagaaaagaaccacattcccttttttgatgttgcttaccaggggtttgctagtggaagccttgatgaagatgcagcttctgtgagactgtttgtggcacgtggcatcgaggttcttgtagctcaatcttacagtaaaaatctcggtctctatgctgaaaggattggagcaatcaatgtgatttcatcgtcaccagaatctgcagcaagggtaaagagccaactgaaaaggattgcccgaccaatgtactctaatccaccggtacacggggctaggatagttgccgatgttgttggaaacccagttctctttaatgaatggaaagcagagatggaaatgatggctggaaggataaagaatgttagacagcagctatatgatagtattacttcaaaagacaaaagtggaaaggattggtcattcatacttaagcagataggcatgttctcattcactggcttgaacaagaaccagagtgacaacatgacaaacaagtggcacgtatacatgacaaaggatggaaggatttccctggcaggattgtcgttggctaaatgcgaataccttgcggatgctattattgattcatatcataatgtcagctgaaactcaattagatatttttggtgagtgttatacccaatcggagcgattggcatacatgaaaataatttagaataatttatgtatgcattatgtgtgtacatatgtacctcaaagtaccctaggaaattttttttaactttgaaacaagttgactcaaagtattgatgcgtaatgagtcaggttctcagacttaaagctagttgaatcgaagtactgatgcatagtgaggatgtttatcatttcatatgggtgagattggataaatcatggtaacaatagtttcgttaaaa

SEQ ID NO: 76 - protein, 463 aa, Glycine max
MASSFLSAASHAVSPSCSLSTTHKGKPMLGGNTLRFHKGPNSFSSSRSRGRISMAVAVNVSRFEGIPMAPPDPILGVSEAFKADNSDVKLNLGVGAYRTEELQPYVLNVVKKAENLMLERGDNKEYLPIEGLAAFNKATAELLLGADNPAIKQQRVATVQGLSGTGSLRLGAALIERYFPGAKVLISAPTWGNHKNIFNDASVPWSEYRYYDPKTVGLDFEGMIEDIKSAPEGSFILLHGCAHNPTGIDPTPEQWEKIADLIEEKNHIPFFDVAYQGFASGSLDEDAASVRLFVARGIEVLVAQSYSKNLGLYAERIGAINVISSSPESAARVKSQLKRIARPMYSNPPVHGARIVADVVGNPVLFNEWKAEMEMMAGRIKNVRQQLYDSITSKDKSGKDWSFILKQIGMFSFTGLNKNQSDNMTNKWHVYMTKDGRISLAGLSLAKCEYLADAIIDSYHNVS

SEQ ID NO: 77 - DNA, 1841 bp, Gossypium raimondii
  misc_feature (60)..(60): n is a, c, g, or t
ctgaaaagtggcaaacgactatacccctaaagacgatttcatcacagtgcacacacacangtctctaccagctcgatcccaacggcagatcatttcacagtgttttggctgaaaaaatcaaaaacccatttcgatcgccaacaccaccaccaaagttttcgctttgatcccatcgcccccttctgcctctactaaaccccttatctctaatccttgctattaccaattgttgatttcattatggcttccacactgctctctttggcttctgccactccctctgcttcactttcttttcatgaaattaacaagggaaaattgaatcttgggtgcatcaacaaggaaaaacccaatcctttcatcaaagcaaagtcttttggtcgagtctctatggttgtggcttccaatgtgtctcatttcgagggtattacaatggctccccctgatccaattcttggggtgtctgaagctttcaaagcagacgaccatgagttgaaactcaaccttggtgttggagcctatagaactgaagagctacagccttatgtgcttgatgtggttaaaaaggcagataagcttctactcgagaaaggggaaaacctagagtatctcccaattgaaggcttggctgctttcaataaagtgacggcggagttgttatttggagcggacaatccagttataaagcaacaaagggttgcaacagttcaagggctttcgggaaccggttcacttcggctggctgcagctctcatagaacgatattttcccggggcaaaagttctaatatcatctcctacatggggtaaccacaagaacattttcaacgatgctagggttccatggtcggaataccgatattacgacccgaaaacagttggtttggattttgaagggatgatagcggacatcaaggcagctcctgagggatcttttattcttcttcatggttgcgctcacaacccaactggtatcgatccaactcctgaacagtggggagtaattgcagatgttatccaagagaagaaccatattccatttttcgatattgcataccaggggtttgcaagtggaagcctggacaccgatgcagcgtctgtgaggatgttcgtggcccgtggtatggaggttattgctgctcaatcatacagtaaaaatctcggcctatatgcagaaaggattggagcaatcaatgttgtttgctcatcaccagaggcagctgcaagggtaaagagccaactgaaaagaatagctcgaccaatgtactcgaatcctcctgttcatggggcaagaattgtcgccaacattgttggggattcagctctcttcaaggaatggaatgctgagatggaaatgatggcagggagaatcaagaatgtgagacataaattgtttgatagtctttcttccaaagataaaagtgggaaggattggtctttcgtttttaagcagatcgggatgttttcgttcacaggcttaaacaaagctcagtgcgataatatgacaaacaagtggcatgtttatatgaccaaggatggaaggatatcccttgcaggattatctttggctaagtgtgaatatttagcagacgccatcattgactcataccccaatgtgagttaacaagataatgaaaaattttactaaaaaaaacatgttgtaataatgtgtttaaactgaccattaaaagaactcttgaatttagagatttgatggaggctggtttttgctccctcttccttttaattttgctcaaagtgggggaattttgaagttctattgattgtatgccaataaatcatttatgaagtaactgaaaactaggggattaactatatcta

SEQ ID NO: 78 - protein, 460 aa, Gossypium raimondii
MASTLLSLASATPSASLSFHEINKGKLNLGCINKEKPNPFIKAKSFGRVSMVVASNVSHFEGITMAPPDPILGVSEAFKADDHELKLNLGVGAYRTEELQPYVLDVVKKADKLLLEKGENLEYLPIEGLAAFNKVTAELLFGADNPVIKQQRVATVQGLSGTGSLRLAAALIERYFPGAKVLISSPTWGNHKNIFNDARVPWSEYRYYDPKTVGLDFEGMIADIKAAPEGSFILLHGCAHNPTGIDPTPEQWGVIADVIQEKNHIPFFDIAYQGFASGSLDTDAASVRMFVARGMEVIAAQSYSKNLGLYAERIGAINVVCSSPEAAARVKSQLKRIARPMYSNPPVHGARIVANIVGDSALFKEWNAEMEMMAGRIKNVRHKLFDSLSSKDKSGKDWSFVFKQIGMFSFTGLNKAQCDNMTNKWHVYMTKDGRISLAGLSLAKCEYLADAIIDSYPNVS

SEQ ID NO: 79 - DNA, 1565 bp, Helianthus exilis
ctcactcaatcttcttcttcttcttcatcgccacccccaaaatcactctaaactcacagatggcttcgattcccctctcatcaatctgtccttcggctgctttgtcattccgagagaagtgcaaggacaaaacgaagtcaaatgttttgttcgggaaggaaaaacaacccctctatatgaaaacaaagtctcgtggtcgaataaccatggctgtagctgtcaacacttcacgattcgataatataacaatggcacctcccgaccctattcttggagtttctgaagcattcaaagctgacacaagtgacatgaagctcaaccttggtgttggagcgtatcgtacagaagaacttcagccgtatgtgcttaaagttgtcaaaaaggctgagaatcttatgctcgaaaggggagaaaacaaggagtatcttccgatcgaaggtttagccgcattcaacaaagccacagctgagttgttgtttggagccgataatccagttctacatcaacagagagttgccaccattcaaggtctctcaggcaccgggtcccttcgagttgctgcagcattgattgaacgatactttccaggagcaaaagttctaatctcatctccaacttggggtaatcacaagaacatttttaacgatgctagagttccgtggtcagagtatcggtattacgatccgaaaacagttggccttgattttgatgggatgattgccgacataaaagctgctccagatggatcatttgtgcttcttcatggatgtgcgcacaacccaacaggtattgatccgactccggaacagtgggaaaaaatcgctgatgtcattcaagaaaagaaccatattccattctttgatgttgcttatcagggatttgctagtggaagcctggatgaagatgcatcttctgtgaggttgtttgccgcacgtggaatggagcttctggttgcacagtcatacagtaaaaatctcggtctttatgccgagagggttggtgcaattaatgtcctatgctcatcatctgatgcagctgtcagggtaaagagccagttgaaaagaatcgcaaggccaatgtactccaacccgcctgttcacggggctcgcattgtcgcaaacgttgtaggaaatccagacttttttaacgagtggaaagaggaaatggaaatgatggcgggaaggatcaaaagcgtgagacaaaagctgtacaataatctatctgcaaaggataagagcggaaaagattggtctttcatacttaagcagattggcatgttttcttttaccggtcttaataaggcccagagcgataacatgaccgataaatggcacgtttacatgacaaaagacggaagaatatcactggctggtttatctgctgcaaaatgcgagtatcttgcggatgctatcatcgattcatatcacaacgtcagttaataacagtcgctgcaaattcaaaaaacgccatcaataattagacaaggtagccttgtttattcagtcttgatataagtttgcagaagtgttgaaataaagtgaactttttgtgagaaaaccctttca

SEQ ID NO: 80 - protein, 459 aa, Helianthus exilis
MASIPLSSICPSAALSFREKCKDKTKSNVLFGKEKQPLYMKTKSRGRITMAVAVNTSRFDNITMAPPDPILGVSEAFKADTSDMKLNLGVGAYRTEELQPYVLKVVKKAENLMLERGENKEYLPIEGLAAFNKATAELLFGADNPVLHQQRVATIQGLSGTGSLRVAAALIERYFPGAKVLISSPTWGNHKNIFNDARVPWSEYRYYDPKTVGLDFDGMIADIKAAPDGSFVLLHGCAHNPTGIDPTPEQWEKIADVIQEKNHIPFFDVAYQGFASGSLDEDASSVRLFAARGMELLVAQSYSKNLGLYAERVGAINVLCSSSDAAVRVKSQLKRIARPMYSNPPVHGARIVANVVGNPDFFNEWKEEMEMMAGRIKSVRQKLYNNLSAKDKSGKDWSFILKQIGMFSFTGLNKAQSDNMTDKWHVYMTKDGRISLAGLSAAKCEYLADAIIDSYHNVS

SEQ ID NO: 81 - DNA, 1821 bp, Hordeum vulgare
  misc_feature (1646)..(1646): n is a, c, g, or t
  misc_feature (1650)..(1650): n is a, c, g, or t
  misc_feature (1753)..(1753): n is a, c, g, or t
ggtttaaaatcaatcattcccccggggttgagggcggccccaaactttttttttttttttttttttgacctaaaatccattgtcattctttctctcatgttaaaataaaaaacaacatgcctgcaagcgcggattgagccaattagaattattacaagcttgtaagcaccgcacaagtaactagcatccgtgagttttgccagattatttattactgtacctctggaattaacggacacatcatcagcatcctgacttacaactcgagctggaaggacccaaaaatcccagcaaactatagaaggaactactcacaatagcgtggctgcgacgcaaatcgtaatctagttgacattgtggaaggagtcgatgatggcatcagcaaggtactcgcatttcgccaggttcagccctgccaacgaaatcctcccgtccttggtcatatatatgtgccatttatcggtcatgttatcgctctggggtctgtccaagcccgtgaaggagaacatgcctatctggctaagaatgaaagaccagtccttgccagactggtcctttgcagtcaagctatcgtaaagcttctgccgaacattcttgatccgccctgccatttgttccatctcttctttccactcaccgaacatggtagggtctccaacaacgttggcgacgatcttggcaccgtgaataggtgggtttgagtacatgggccgcgccaatcgcttcaactggctcttcaccctatctgcaacttccggtgctgtgcaaatgacatttatcgcaccgatcctttctgcatatagaccaaggttcttgctgtaagactgtgcaacaaacacttccaggccacgcttaacaaaaagcctgacggaggatgcatcttcatcaaggcttccactggcaaaaccttgataggcaacatcaaagaaaggcatatgttttttctcttcaatcagatctgccagtttctcccactgttgaggagttgggtctattccagttggattgtgagcacaaccatgtagcagaacaaaagacccttctggggcagcctgtatgtcagctatcattccttcaaaatccagcccaacagtcttgggatcataataccggtattctgaccatggcaccctagcatcattgaatatgtttttgtggtttccccatgtgggagatgatataagtacttttgcatcagggaagtatctctgaataaatgctgcagcaaggcgtaatgatccagtccctgagagagactgaagagtagcaacccgtccttgcttgatgacaggattgtcagctccaagcaatagatctgcagttgctttgttaaatgcagcaaagccttcaataggcagatactctttgttttctcctttctctagcataagtttttcagccttcttgacaacgttgaggactgcgggctgtagctcttccgttctgtaggcgccaacaccaaggttgagcttcagatcacttgtatctgctttaaacgcttccgagaccccaaggatcgggtctggaggggccatcgacactccttcaaagcgagaagcgtgtactgtaagtgccaccgctatgtggcgcagttttttgtccctacgcgattcgccgagcgccggcatccacggcctcacccgtcncttnacttggtcacgcgcgaactactctagtcccgggcggcggcggcggcgacgcggaggcccggcgcggagagggcggaggcctccctggggcagagtgcagcttncgagcaggagggggcgagggtgatgtgggtccagagcggagcgggtggatggcgatggccttggacga

SEQ ID NO: 82 - protein, 427 aa, Hordeum vulgare
MPALGESRRDKKLRHIAVALTVHASRFEGVSMAPPDPILGVSEAFKADTSDLKLNLGVGAYRTEELQPAVLNVVKKAEKLMLEKGENKEYLPIEGFAAFNKATADLLLGADNPVIKQGRVATLQSLSGTGSLRLAAAFIQRYFPDAKVLISSPTWGNHKNIFNDARVPWSEYRYYDPKTVGLDFEGMIADIQAAPEGSFVLLHGCAHNPTGIDPTPQQWEKLADLIEEKKHMPFFDVAYQGFASGSLDEDASSVRLFVKRGLEVFVAQSYSKNLGLYAERIGAINVICTAPEVADRVKSQLKRLARPMYSNPPIHGAKIVANVVGDPTMFGEWKEEMEQMAGRIKNVRQKLYDSLTAKDQSGKDWSFILSQIGMFSFTGLDRPQSDNMTDKWHIYMTKDGRISLAGLNLAKCEYLADAIIDSFHNVN

SEQ ID NO: 83 - DNA, 1687 bp, Lotus japonicus
agtgattctcgcaatctttctttaatctcatcgttccctccgcaatccaatttcgattcatccgatggcggcgtcttcagtgttctctgtagcttcacactctgtttcgccttcgaatcaccatgctcacaagggaaaaaccaagattggaggtagcggtttgagattggcaaattcaaggtcttctggcagtggccggatctctatggctgttgctgttaatgcttctcgatttgagggaataccgatggctccacctgatccaattctcggagtttctgaagcatttaaagcggacaaatgcgatctcaagctcaatcttggagttggggcctacagaactgaagaattacagccatatgtgcttaatgttgttaagaaggcagagaatcttatgctgaatagaggggaaaacaaagagtatctacctattgagggttgggctgcatttaataaggcaactgcagagttgttactcggagctgacaacccagcaatcaaagaacaaagagttgccactgtccaaggtctttctggaactggttctctgcgactagctgctgctctgatagagcgatattttccaggggcaaaagttttgatatcatcccctacctggggtaatcacaagaatattttcaatgatgctagagtcccatggtcagagtaccgatattatgatcctaagacggttggattggattttgagggcatgttagaagatataaagtcagctcctgaaggatctttcgtgctacttcatggatgtgctcataaccctaccggtattgatcccacaccagaacagtgggtgaaaatagctgatctaattcaacaaaagaaccacattccattttttgatgtcgcttaccaggggtttgctagtggaagcctggatgaagatgctgcttctgtgcgatggtttgtgtcacgtggcatggaggttctagtagctcagtcatacagtaaaaatcttggtctctatgctgaaaggattggagcaatcaatgtcatttcctcatcaccagaatctgctgcaagggtaaagagccaattgaaaaggattgccaggccaatgtactctaatccaccggttcacggggctaggattgttgctgatatagttggaaatccagatctcttcaatgaatggaaagcagagatggaaatgatggcaggaaggataaagaatgttagacagaagctatatgatagtatttcttcaaaagacaagagtggaaaggattggtcattcatacttgagcagataggcatgttctcattcacaggcttgaacaagaatcagagtgacaatatgacaaataagtggcatgtatacatgacaaaagatggaaggatttccctggcaggattgtcactggccaaatgtgaataccttgcagatgctattattgactcttatcataatgtcagctgaaactggatgaaatattctttatcaccaagcttatattttttggtgagtattgtatccaatcatagtggtcggcacacatgacaataattcatgtaaacattaatgtcatacatgtacttttaattccctaggaaattttgtaaccttaaaataagttgaatcaaactattgatgcataatgagtctgcttctcggacttggagcaagttggatcaaagtattgatttataatgagactgtttctttcat

SEQ ID NO: 84 - protein, 457 aa, Lotus japonicus
MAASSVFSVASHSVSPSNHHAHKGKTKIGGSGLRLANSRSSGSGRISMAVAVNASRFEGIPMAPPDPILGVSEAFKADKCDLKLNLGVGAYRTEELQPYVLNVVKKAENLMLNRGENKEYLPIEGWAAFNKATAELLLGADNPAIKEQRVATVQGLSGTGSLRLAAALIERYFPGAKVLISSPTWGNHKNIFNDARVPWSEYRYYDPKTVGLDFEGMLEDIKSAPEGSFVLLHGCAHNPTGIDPTPEQWVKIADLIQQKNHIPFFDVAYQGFASGSLDEDAASVRWFVSRGMEVLVAQSYSKNLGLYAERIGAINVISSSPESAARVKSQLKRIARPMYSNPPVHGARIVADIVGNPDLFNEWKAEMEMMAGRIKNVRQKLYDSISSKDKSGKDWSFILEQIGMFSFTGLNKNQSDNMTNKWHVYMTKDGRISLAGLSLAKCEYLADAIIDSYHNVS

SEQ ID NO: 85 - DNA, 1806 bp, Marchantia polymorpha
  misc_feature (1805)..(1805): n is a, c, g, or t
cttcctcctctgctgtgtcggccctcggctctgccgctgtgagatggacatcccgctgcatttttgctcttgccgataataggtgcacctggactttcgttcctcaaaggcagttgtcaggcttgactagcgcaggcgtatctggtcaaaaggtggtcagcactacctcgtttgtgaaaaggcagttctcaggcttgagaggcgctgccttccctggccaaaaagtggtcagcacgcccttatttgtgaagtcgaactcgagaacgacaatgacgttggcagcaggagtatcgaaattcgaggccgtgacaatggcaccgcctgatccaattttgggtgtctctgaagcattcagggcagacaccagtgatgccaagctgaaccttggtgtcggcgcctaccgtaccgaggaactgcagccactagtattgaacgttgtcaaaaaggcagaaaagaagatgctggagtctggcgaaaacaaagagtaccttccaattgagggtcttgccgcctttaacaaagccacagcggaacttctactgggtgccgattctcctgccattaaggaaggacgggtagcaactgtgcaagggctctctggcactggctctctccgtcttggtgctgcgttcattcagcgatactttcctggtgccaaggttttgatctcatcaccaacatggggaaatcacaagaatattttcaacgacgctggtgtgccatggtcggagtaccgttactttgagccgaaaaccgtggggcttgattttgaaggaatgatggcagatatcaaggacgctcccagtggctcgttcatccttctgcacggttgtgcccacaacccaacgggaattgacccaacgccagagcaatgggagaaaatcgccgaccttattgaggagaaaggacacatggcctttttcgacgtcgcataccagggttttgcaagcgggagccttgatcaagacgccgactccgtcagactctttgtgaagcgtggacttgagattttggtcgcacaatcttacagcaagaatttgggtctgtatgctgagcgaatcggagctatcaatgcggttgtgcactcttcggatgttgctgtcagggttaagagtcagttgaagagactggcaaggccaatgtactcgaatccacctgttcacggtgcgaaaattgttgcaaacgtcgttggagatgccgcacttttcgatgaatggagagccgagatggaaatgatggctggacgcatcaaaaccgtcagacaaagactgtatgacgatctctcaaccaaggacaagagcggcaaagattggtcatttgtgctcaagcaaattggcatgttttctttcactggtctcaacagggcgcagagtgacaatatgtcggacaagtggcacgtgtacatgaccaaggatggtcgtatttccttggctggactttctctggctaagtgcagttatcttgctgatgctattatcgactcgtactacaatgtgcaataagtcagtgagattggagtcacgatcaaaaggcggccattggtccagttttgccctacttccccctcgcgtaatacagcatcgaaggatggtgggtttcacaaatgatgggtgaattgcccttatagtcggagctaaaagtccgggttacccacattcagagtatcgagtttggtcagggatgctttgtttctctcctcttttcattaaaacatgtagaatactacggcaacgatatctgttgaaagattcatcaggaaaattttctcgacaacctaataaagactgagtttagctgccaatcana

SEQ ID NO: 86 - protein, 410 aa, Marchantia polymorpha
MTLAAGVSKFEAVTMAPPDPILGVSEAFRADTSDAKLNLGVGAYRTEELQPLVLNVVKKAEKKMLESGENKEYLPIEGLAAFNKATAELLLGADSPAIKEGRVATVQGLSGTGSLRLGAAFIQRYFPGAKVLISSPTWGNHKNIFNDAGVPWSEYRYFEPKTVGLDFEGMMADIKDAPSGSFILLHGCAHNPTGIDPTPEQWEKIADLIEEKGHMAFFDVAYQGFASGSLDQDADSVRLFVKRGLEILVAQSYSKNLGLYAERIGAINAVVHSSDVAVRVKSQLKRLARPMYSNPPVHGAKIVANVVGDAALFDEWRAEMEMMAGRIKTVRQRLYDDLSTKDKSGKDWSFVLKQIGMFSFTGLNRAQSDNMSDKWHVYMTKDGRISLAGLSLAKCSYLADAIIDSYYNVQ

SEQ ID NO: 87 - DNA, 1797 bp, Nicotiana tabacum
taacaagatagaagaaggaagaacatctgaagatggcttccacaatgttctctctagcttctgccgctccatcagcttcattttccttgcaagataatctcaagtcaaagctaaagctggggactactagccaaagtgcctttttcgggaaagacttcgcgaaggcaaagtcaaatggtcggactactatggctgtttctgtgaacgtctctcgatttgagggaataacaatggctcctcctgaccccattcttggagtttctgaagcattcaaggctgatacaaatgaactgaagcttaaccttggagttggagcttaccgcacagaagatcttcaaccctatgtcctcaatgttgttaaaaaagcagaaaaccttatgctagagagaggtgacaacaaagagtatcttccaatagaaggtttggctgcattcaacaaagtcacagcagagttattgtttggagcagataacccagtgattcagcaacaaagggtggctactattcaaggtctatcaggaactgggtcattgcgtattgctgcagcactgatagagcgttacttccctggctctaaggttttaatatcatctccaacctggggaaatcataagaacattttcaatgatgccagggtgccttggtctgaatatcgatattatgatcccaaaacagttggcctggattttgctgggatgatagaagatattaaggctgctcctgaaggatcatttatcttgctccatggctgtgcgcacaacccaactggtattgatcccacaattgaacaatgggaaaagattgctgatgtaattcaggagaagaaccacattccattttttgatgtcgcctaccagggattcgcaagcggcagccttgatgaagatgcctcatctgtgagattgtttgctgcacgtggcatggagcttttggttgctcaatcatatagtaaaaatctgggtctgtatggagaaaggattggagctattaatgttctttgctcatccgctgatgcagcgacaagggtgaaaagccagctaaaaaggcttgctcgaccaatgtactcaaatcccccaattcacggtgctagaattgttgccaatgtcgttggaattcctgagttctttgatgaatggaaacaagagatggaaatgatggcaggaaggataaagagtgtgagacagaagctatatgatagcctctccgccaaggataaaagtggaaaggactggtcatacattctgaagcagattggaatgttctccttcacaggcctcaacaaagctcagagcgagaacatgaccaacaagtggcatgtgtacatgacaaaagacgggaggatatcgttggctggattatctgctgccaaatgtgaatatcttgcagatgccataattgactcatactacaatgtcagctaaaaatcttggatatgagaatagtagttcatagtaatatctggaggaaattcaatgtagttcattccttattttgagcaagttatcctcaaatattgtaataataatagtttttgatttgtctgcggttcacagatttcatctgtatgtagcaaattttgggacaacttctaaacagccagattctgtagttattatgtaagaaagttttccagagcgaaatactcgagtagacatcttagtctagctaattatcacttcaactatatttttgttgacatacaaaatctctaagcagactataggattcttaacaaacataacatcatgactaagctttatcctacttgtcggtattgcttaaagagtacctgcaggt

SEQ ID NO: 88 - protein, 462 aa, Nicotiana tabacum
MASTMFSLASAAPSASFSLQDNLKSKLKLGTTSQSAFFGKDFAKAKSNGRTTMAVSVNVSRFEGITMAPPDPILGVSEAFKADTNELKLNLGVGAYRTEDLQPYVLNVVKKAENLMLERGDNKEYLPIEGLAAFNKVTAELLFGADNPVIQQQRVATIQGLSGTGSLRIAAALIERYFPGSKVLISSPTWGNHKNIFNDARVPWSEYRYYDPKTVGLDFAGMIEDIKAAPEGSFILLHGCAHNPTGIDPTIEQWEKIADVIQEKNHIPFFDVAYQGFASGSLDEDASSVRLFAARGMELLVAQSYSKNLGLYGERIGAINVLCSSADAATRVKSQLKRLARPMYSNPPIHGARIVANVVGIPEFFDEWKQEMEMMAGRIKSVRQKLYDSLSAKDKSGKDWSYILKQIGMFSFTGLNKAQSENMTNKWHVYMTKDGRISLAGLSAAKCEYLADAIIDSYYNVS

SEQ ID NO: 89 - DNA, 1864 bp, Oryza sativa
gattctgaattttcccaggaatctgagcggccgcaaggcgtcacgcgaaacccgtccaacccaactccactccatcctctgcagccgcagttgtgacggagactccaaggccatcaccatccacccgctctcctcctcctcctcctccgcttgatccctccatctcctcgatcgatctccacactccactgcgcactgcaccagcaacgcccccccctgatccctctccacggctgcaccggagatggcttccgcccccttcgccgtctcctcctcaccggcggcttccgccgtggccgcgcgctccaaggtgttgcgaggagggaggagcgaggcgaggactggatgccgcctggggatcacgaggaagaattttggacgtgtcatgatggcccttgcagtagatgtctctcgttttgaaggagtgccgatggcccctccagacccaattctcggggtttcagaagcatttaaggcagatcaaaatgatctgaagctcaaccttggtgttggtgcctatagaacagaagagttacagccttatgtcctcaatgtggtcaagaaggctgaaactcttatgttggagaaaggagaaaacaaggagtatctgccaattgaaggcttagctgcatttaacaaagcaactgcagaactattgtttggagctgataatccagtactcaagcaaggacgtgttgctactcttcagtctctctcaggaaccgggtcgctgcgccttgctgcagcatttatacaaagatatttccctgaagcaaaagtactgatatcatctcccacttggggcaatcacaagaacattttcaatgatgcaaaggtaccttggtcagagtaccgttattacgaccccaagactgttggcttggattttgagggaatgatagctgacatacaggctgccccagatggatcttttgttctgctgcatggttgcgctcacaacccaactggaatagacccaactccggaacaatgggagaaaattgcagatgtcattcaagagaagaaacacatgcctttctttgatgttgcatatcagggttttgccagtggaagccttgatgaagatgcatcttctgtcaggctttttgttcaacggggactggaagtgtttgttgcgcagtcttatagcaaaaaccttggtttatatgcagaaagaattggagcaataaatgttgtctgctcaacacctgaagtcgcaaacagggtgaagagccagctgaaacgattggcacggcccatgtattcgaatccccctattcatggtgctaggatagttgccaacgttgttggggatccaaccatgtttggtgaatggaaacaggagatggaagaaatggcagggcgtatcaagaatgtaagacagaagctttatgatagtttgtctgcaaaggacgacagtggcaaggactggtctttcattctgaggcagataggcatgttctcctacacgggcttgaacaaaactcagagtgataatatgaccgacaaatggcacatatacatgacaaaggatgggagaatttcgttggctggattgtccctggctaaatgcgagtacctagctgacgccatcatcgactccttccataacgttagctagacgaggattcaggtcactgctattgtggttaatccttcaatatgctgggatttttggttccttccagcttgagttcttagccaggattgtatatccggcgctacgtaatttggagataataatgaattttgtctgtgcaacaaactttgcatatgctttgtcgaatgtacactggcactatgttagaagcttgaaatatcgaattgaataataatgagactagcaataagccaaactaattcc

SEQ ID NO: 90 - protein, 458 aa, Oryza sativa
MASAPFAVSSSPAASAVAARSKVLRGGRSEARTGCRLGITRKNFGRVMMALAVDVSRFEGVPMAPPDPILGVSEAFKADQNDLKLNLGVGAYRTEELQPYVLNVVKKAETLMLEKGENKEYLPIEGLAAFNKATAELLFGADNPVLKQGRVATLQSLSGTGSLRLAAAFIQRYFPEAKVLISSPTWGNHKNIFNDAKVPWSEYRYYDPKTVGLDFEGMIADIQAAPDGSFVLLHGCAHNPTGIDPTPEQWEKIADVIQEKKHMPFFDVAYQGFASGSLDEDASSVRLFVQRGLEVFVAQSYSKNLGLYAERIGAINVVCSTPEVANRVKSQLKRLARPMYSNPPIHGARIVANVVGDPTMFGEWKQEMEEMAGRIKNVRQKLYDSLSAKDDSGKDWSFILRQIGMFSYTGLNKTQSDNMTDKWHIYMTKDGRISLAGLSLAKCEYLADAIIDSFHNVS

SEQ ID NO: 91 - DNA, 1856 bp, Picea glauca
cgttaatttcgttcacagacatttatttattctgattttcaaatggctacctttgctgccgcatcagccaagcccatggctgtcatcgataactctcagttgagtctatgtcagaagaagtttgacggtcttcgggttggctatgcattcgccaagaggaaagacagttcctttttgaaagtgaagtctgtgagcagaattaacatggctcttgcaacagacgtttctcgctttgaaggagtgacaatggcacctccagatccaattctgggtgtttcagaagcatttaaagcagatacaaatgatttgaagcttaatcttggtgttggagcttacagaacagaagatcttcaaccctatgtgctcaatgtggtgaaaaaggcagagaatatgatgttggagaaaggagaaaataaggagtatctgcctattgaaggtttggctgcttttaataaggctactgtggagttgttgctgggagctgacaatgatgcaacaaagcaaggacgggtggcaactgtccaaggcctttcaggaactggttctcttcgccttgctgctgcctttattcaaagatattttcctggagtacaagtcttgatttcttctccaacttgggggaatcacaagaacattttcaatgatgctggtgttccatggtcggaataccggtactatgatcctaaaaccgtaggactagactttgaagggatgattgcagatattaaggctgcaccaagcggttcttttgtgttgcttcatggttgtgctcacaatccaactggaattgatccaactcctgagcagtgggagaagatcgctgatgttattcaggaaaaggatcttactgctttctttgatgttgcttatcagggatttgcaagtggcagtcttgatgaggatgcatcatctgtgaggctgtttgtagctcgtggaatggaagtttttgttgctcagtcctacagcaagaacttgggtctctatgcagaaaggataggagctattaatgttgtgtgctcatcatcagatgcagcaattagggtgaagagccaacttaaaaggcttgctagaccaatgtactcaaatcctccagttcacggggctcaaattgtggcaaatgttgttggtaatcctactctgtttgatgaatggaagtcagaaatggaacttatgtccggaagaatcaagggtgtgaggcagcgactctatgataatctttctgcaaaggataagactgggaaagattggtcctttgttctcagacagattggcatgttttccttcacgggccttaacaaagctcagagtgagaatatgtcaaataagtggcatatctacatgacaaaggatgggcgtatctccttggctgggctgtctctatccaaatgcgagtatcttgcagatgccatagttgactcttactataatgtcagttaaacaacaggaatatatcaaaacctactatcaattttctatgctagaaaatattcctaattttgaagcacctgacatcacattgagtgttgatgtctgaggcattctcatcagtattcatctacaaaattttgtctggtttaccgatctttcattgtttatcttgttaaataaaggtctgacattggttgccacctatctggcaggaagaccatagaacatattttacaagcagattctgctttctagaattgctatccttctattttgctagtgcagataacatttcaagttcataaaatatgagcctggtttttgaaatctagagatattgctgtttaattgtcttttatatcaaaggatttgagtattttttgtagcccactgcccaatttctgtaatgtcagatgcaaaatcttgtc

SEQ ID NO: 92 - protein, 464 aa, Picea glauca
MATFAAASAKPMAVIDNSQLSLCQKKFDGLRVGYAFAKRKDSSFLKVKSVSRINMALATDVSRFEGVTMAPPDPILGVSEAFKADTNDLKLNLGVGAYRTEDLQPYVLNVVKKAENMMLEKGENKEYLPIEGLAAFNKATVELLLGADNDATKQGRVATVQGLSGTGSLRLAAAFIQRYFPGVQVLISSPTWGNHKNIFNDAGVPWSEYRYYDPKTVGLDFEGMIADIKAAPSGSFVLLHGCAHNPTGIDPTPEQWEKIADVIQEKDLTAFFDVAYQGFASGSLDEDASSVRLFVARGMEVFVAQSYSKNLGLYAERIGAINVVCSSSDAAIRVKSQLKRLARPMYSNPPVHGAQIVANVVGNPTLFDEWKSEMELMSGRIKGVRQRLYDNLSAKDKTGKDWSFVLRQIGMFSFTGLNKAQSENMSNKWHIYMTKDGRISLAGLSLSKCEYLADAIVDSYYNVS

SEQ ID NO: 93 - DNA, 1899 bp, Physcomitrella patens
gagtattcaggcgaggtggcgtgttttgggcccttgaatcaatacgtgcaacttatgcatctctttagttcctccgcttctctgttgctcactcccgtctttgagcactccaccatctccagttgtttcttccttgactcgtcgctgttagattgcaatgactacagcgatggcgtcctcggctgcactgacagctcttgcgagcggccaagaagttcttcggagtggcgttacgcagaagttctctggccttagggttgccgctttccctctgaagaaggacaacgtcgctctttacgttaagggcaagtcaacgtcagtcatgtcggttgccactgatgtatctcgattcgagtcagtaaccatggctcctgcggaccccatcctgggagtttcagaggctttcaagaaggacaacagcgagaagaagctgaacttgggagtaggtgcttaccgaactgaggatctccagccctatgtattggaggtcgttaagaaggctgagaagaaaatgctggaaggtggcgacaacaaagagtaccttcccattgagggacttgctgctttcaacaaggctactgcagagttgctattgggagccgacaacgccgccattaaagagaaccgggttgccaccgtccaaggcctttctggtacgggttctcttcgcttgggtgctgctttcattcaacgttacttccctggcatcaccgtttacatctcttctccaacttggggaaaccacaagaacatatttaatgatgctggtgtcccatggaaagaataccgctactttgaccccaaaactgtcggcttagacttcgatggcatgatggaagacattgagaacgcacctgagggttcaattatattgttgcacgggtgtgcacacaacccaactggcattgacccaacaccagaccaatgggagaagattgctgatcttattcagcaaaagaaccatatggcattctttgatgtagcttaccagggtttcgccagtgggagcctggatgacgatgctagttccgtgaggaagttcgttgcccgtggtatggaggttttcgtggcacaatcctacagcaagaatctcggtctctatgccgagcgtgtgggtgctatcaatgcgattgtatcctctgcagatgttgctgctagggttaagagccagctgaagaggattgcaagaccaatgtactcaaacccacctgttcacggtgcccgtattgttgccaacgttgttggcgagccaactatgttcgacgagtggagagcagagatgcagatgatggctggccgtatcaagacagtgaggcagagattgtacgatgaactttctaccaaggacaagagtggcaaagattggtctttcgttctcaagcaaattggaatgttttcatttactggtctaaacaaggcacagagtgacaatatgactgacaaatggcacgtgtacatgaccaaggatggtcgtatttcacttgctggactcaacttggcaaagtgtgcttacttggccgatgctattattgactcttattacaacatccagtaacttcattagctgacttacttccttggagaggacattctcgatcttataatatggttcctaaatgaagtctttcttgcgttcaaaagttgggaatttagttttcacattttttgcacctagattctgtgtagtggatagagagagattgaccctgccgagtgtgttggtttccgcccagattgagaaaaggacttgagtgtccagtagaattgagcggcaatttcgacaaatttggcacttattgctcaggaagtgctgaaccaggagagtccagctggcttgttctttgattggctgctggagtagcctttttaatgggtatcatgtagtgacattttgattgc

SEQ ID NO: 94 - protein, 465 aa, Physcomitrella patens
MTTAMASSAALTALASGQEVLRSGVTQKFSGLRVAAFPLKKDNVALYVKGKSTSVMSVATDVSRFESVTMAPADPILGVSEAFKKDNSEKKLNLGVGAYRTEDLQPYVLEVVKKAEKKMLEGGDNKEYLPIEGLAAFNKATAELLLGADNAAIKENRVATVQGLSGTGSLRLGAAFIQRYFPGITVYISSPTWGNHKNIFNDAGVPWKEYRYFDPKTVGLDFDGMMEDIENAPEGSIILLHGCAHNPTGIDPTPDQWEKIADLIQQKNHMAFFDVAYQGFASGSLDDDASSVRKFVARGMEVFVAQSYSKNLGLYAERVGAINAIVSSADVAARVKSQLKRIARPMYSNPPVHGARIVANVVGEPTMFDEWRAEMQMMAGRIKTVRQRLYDELSTKDKSGKDWSFVLKQIGMFSFTGLNKAQSDNMTDKWHVYMTKDGRISLAGLNLAKCAYLADAIIDSYYNIQ

SEQ ID NO: 95 - DNA, 1836 bp, Picea sitchensis
gaggactctcatttttcgtcgacccgttaatttcgatcacagacatttacttattctgattttcaaatggctacctttgctgcagcatcagccaagcccatggctgtcatcgataactctcagttgagtctatgtcagaagaagtttgacggtcttcgggttggctatgcattcgccaagaggaaaagcagttcctctttgaaagtgaagtctgtgagcagaattaacatggctcttgcaacagacgtttctcgctttgaaggagtgacaatggcacctccagatccaattctgggtgtttcagaagcatttaaagcagatacaaatgatttgaagcttaatcttggtgttggagcttacagaacagaagatcttcaaccctatgtgctcaatgtggtgaaaaaggcagagaatatgatgttggagaaaggagaaaataaggagtatctgcctattgaaggtttggctgcttttaataaggctactgtggagttgttgctgggagctgacaatgatgcaacaaagcaaggacgggtggcaactgtccaaggcctttcaggaactggttctcttcgccttgctgctgcctttattcaaagatattttcctggagtacaagtcttgatttcttctccaacttgggggaatcacaagaacattttcaatgatgctggtgttccatggtcggaataccggtactatgatcctaaaaccgtaggactagactttgaagggatgattgcagatattaaggctgcaccaagcggttcttttgtgttgcttcatggttgtgctcacaatccaactggaattgatccaactcctgagcagtgggagaagatcgctgatgttattcaggaaaaggatcttactgctttctttgatgttgcttatcagggatttgcaagtggcagtcttgatgaggatgcatcatctgtgaggctgtttgtagctcgtggaatggaagtttttgttgctcagtcctacagcaagaacttgggtctctatgcagaaaggataggagctattaatgttgtgtgctcatcatcagatgcagcaattagggtgaagagccaacttaaaaggcttgctagaccaatgtactcaaatcctccagttcacggggctcaaattgtggcaaatgttgttggtaatcctactctgtttgatgaatggaagtcagaaatggaacttatgtccggaagaatcaagggtgtgaggcagcgactctatgataatctttctgcaaaggataagactgggaaagattggtcctttgttctcagacagattggcatgttttccttcacgggccttaacaaagctcagagtgagaatatgtcaaataagtggcatatctacatgacaaaggatgggcgtatctccttggctgggctgtctctatccaaatgcgagtatcttgcagatgccatagttgactcttactataatgtcagttaaacaacaggaatatatcaaaacctactatcaattttctatgctagaaaatattcctaattttgaagcacctgacatcacattgagtgttgatgtctgaggcattctcatcagtattcatctacaaaattttgtctggtttaccgatctttcattgtttatcttgttaaataaaggtctgacattggttgccacctatctggcaggaagaccatagaacatattttacaagcagattctgctttctagaattgctatccttctattttgctagtgcagataacatttcaagttcataaaatatgagcctggtttttgaaatctagagatattgctgtttaattgtcttttatatcaaaggatttgagtattttttgt

SEQ ID NO: 96 - protein, 464 aa, Picea sitchensis
MATFAAASAKPMAVIDNSQLSLCQKKFDGLRVGYAFAKRKSSSSLKVKSVSRINMALATDVSRFEGVTMAPPDPILGVSEAFKADTNDLKLNLGVGAYRTEDLQPYVLNVVKKAENMMLEKGENKEYLPIEGLAAFNKATVELLLGADNDATKQGRVATVQGLSGTGSLRLAAAFIQRYFPGVQVLISSPTWGNHKNIFNDAGVPWSEYRYYDPKTVGLDFEGMIADIKAAPSGSFVLLHGCAHNPTGIDPTPEQWEKIADVIQEKDLTAFFDVAYQGFASGSLDEDASSVRLFVARGMEVFVAQSYSKNLGLYAERIGAINVVCSSSDAAIRVKSQLKRLARPMYSNPPVHGAQIVANVVGNPTLFDEWKSEMELMSGRIKGVRQRLYDNLSAKDKTGKDWSFVLRQIGMFSFTGLNKAQSENMSNKWHIYMTKDGRISLAGLSLSKCEYLADAIVDSYYNVS

SEQ ID NO: 97 - DNA, 2087 bp, Pinus taeda
gttcgaactattctctgaatctcgtttgctttgatttgctctataattgttttatagctcattttccttctgtggtcgaggttcaaatcccgggaactgtatatttgccttatacttgcacagatattaagaatttttatctggatctataaaatttctgcgagatatttatttattctgattttcaatggctaccttcgctgctgcatcagccaagcccatggctgtcatcgataactctcagttgaatctatctcagaagaagtttgatggtcttcggattggccatgcgttcgccaagaggaaagacagttcctctttgaaagtcaaggctgtgagcagaattaacatgactattgcaacagatgtctctcgctttgaaggagtgacaatggcacctccagatccaattcttggtgtttcagaagcatttaaagcagatacaagtgatttgaagcttaatcttggtgttggagcttacagaacagaagaacttcaaccctatgtgctcaatgtggtgaaaaaggcagagaatctgatgttggaaaagggagacaataaagagtacctccctattgaaggtttggctgcttttaataaggctactgtggaattgttgctgggagctgacaataatgcaaccaagcaaggacgggtggctactgtccaaggcctttcaggaactggttctcttcgcctcgctgctgcctttattcaaagatatttccctggagcacaagtcttgatttcttccccaacttgggggaatcacaagaacattttcaatgatgctggggttccatggtcggaataccggtactatgatcctaaaactgtaggactagattttgaagggatgattgcagacattaaggctgcaccaagtggttcttttgtgctgcttcatggttgtgctcacaatccaactggaattgatccaactcctgagcagtgggagaagattgctgatgtcattcaggaaaagaatcttactgctttctttgatgttgcttatcagggatttgcaagtggcagtcttgatcaggatgcatcatctgtgaggttgtttgtagctcgtgggatggaagtttttgttgctcagtcctacagcaagaacttgggcctctatgcagaacggataggagctatcaatgttgtgtgctcctcatcagatgcagcaactagggtgaagagccagcttaaaaggcttgctagaccaatgtactcaaatcctccagttcatggggctcgaattgtggcaaatgttgttggtaatcctactctgtttaaagaatggaagtcagaaatggaacttatgtctggaagaattaagggtgtgaggcagcgactctatgataatctttctgcaaaggataagagtgggaaagattggtcttttattcttagacagattggcatgttttccttcacgggccttaacaaagctcagagtgataatatgacaaataagtggcatgtctacatgacaaaggatgggcgtatttccttggctggtctgtcgctgtccaaatgcgagtaccttgcagatgccatatttgactcctactataatgtcagctaaacaacaggattatatcaaaatctaatatcaattttctatgctagaaatattactaattttgaagcacctgacatcacattgggtgttgatgtctgaggcattcttatcagtatgcattctacaaaattttggctgcttaccgatctttcattgttcattttgttaaataaaggtctgacattggatgccacctgtttggccggaagaccatagagtatttttcaagcagattctgctttctccagtttctgtcctatttttctagagcagataacatttaaagttagtaaaatataagctcggtttttgaaatctagggatattgctgtttaattgtcttctatataaagggatttgaataacttttgtagtccagtgcccaatttctgtaacgtcagatggaaaattgtgtcaggtcttagcatatcttgtacgtgttgtcattggtagttattagcacttgtgcagctatatgccggaattcacacaaatagattcagttctg

SEQ ID NO: 98 - protein, 464 aa, Pinus taeda
MATFAAASAKPMAVIDNSQLNLSQKKFDGLRIGHAFAKRKDSSSLKVKAVSRINMTIATDVSRFEGVTMAPPDPILGVSEAFKADTSDLKLNLGVGAYRTEELQPYVLNVVKKAENLMLEKGDNKEYLPIEGLAAFNKATVELLLGADNNATKQGRVATVQGLSGTGSLRLAAAFIQRYFPGAQVLISSPTWGNHKNIFNDAGVPWSEYRYYDPKTVGLDFEGMIADIKAAPSGSFVLLHGCAHNPTGIDPTPEQWEKIADVIQEKNLTAFFDVAYQGFASGSLDQDASSVRLFVARGMEVFVAQSYSKNLGLYAERIGAINVVCSSSDAATRVKSQLKRLARPMYSNPPVHGARIVANVVGNPTLFKEWKSEMELMSGRIKGVRQRLYDNLSAKDKSGKDWSFILRQIGMFSFTGLNKAQSDNMTNKWHVYMTKDGRISLAGLSLSKCEYLADAIFDSYYNVS

SEQ ID NO: 99 - DNA, 1701 bp, Populus trichocarpa
aacccatcattatttcaagcgccatttacagttctgtcaaatccagtcacacaaatacttttagatcactcaagtagctgtttgattttatcaaaatcattccttagaaatctaatcatcgagcagtgttattttttgttattcagatggcttcaacaatgctttctttagcttctaccactccttctgcttcactttctatgcaagaaattctcaagggaaaggcgaggcttggaagtggtagtgtgagtacattgtttaacaaggagaaaggcaatccctttatcaaggcaaagtcatttggccggatatctatgactgtcgcagttaatgtatctcgttttgagggtatagctatggctcctcctgatcctatccttggtgtttctgaagcttttagagcagacacggatgtaaagaagctcaaccttggagttggggcctaccgaactgaagagttacagccttatgtgcttgatgtcgttaagaaggctgagaatcttatgctggagaggggtgaaaacaaggagtatctcccaattgaaggtttggctgcattcaataaggtgactgcagagttattattcggagctgacaacccagtgataaaacaacaaagagttgcaactgttcaaggtctttcaggcactggttcgcttcgattagctgcagcgctcattgagagatattttcctggagcgcaagttctgatatcatctccaacttggggtaatcacaagaatattttcaatgatgcaagagttccatggtccgagtaccgatactatgatcccaaaacagttggcttggattttgaggggatgatatcagacataaaggcagcccctgagggatcatttgtattgcttcatggctgtgcacacaacccgactggtattgatccaacccctgaacaatgggagaaaattgctgatgtcattcaagaaaagaaccacgttccattttttgatgtggcctaccagggattcgctagtggaagcctcgatgcagatgcatcatcagtgaggttgtttgctgcacgtggtatggagcttttgattgctcagtcgtacagcaaaaacttgggcttgtatgctgaaagaattggggcaattaatgttgtctgctcatcggcagatgcagcagcaagggttaagagccagctgaaaaggattgcccgaccaatgtactcaaatcctcctgttcacggtgctaggattgttgctaacgttgttggggatccaattctctttaatgaatggaaagaagagatggagatgctggctggaaggataaaaaatgtgaggcagaaactatttgacagtctctccgcaaaagataagagtgggaaagattggtcttttatactgaagcagattggcatgttctccttcacaggcttgaacaaaactcagagcgaaaatatgaccaacaagtggcatgtctatatgacaagggatggaagaatatccttggcaggactgtctttggccaaatgtgaataccttgctgatgccattattgactcttaccataatgtcagttgatggagatagtgaacgggtataccagaaccaacagttaataaattttggtgacttcgatgttttactgagtttatattattttacagaaattttgtaataatgttcactggtatgaccgtcacaaatccatgtaaactgagctttgattgaggct

SEQ ID NO: 100 - protein, 466 aa, Populus trichocarpa
MASTMLSLASTTPSASLSMQEILKGKARLGSGSVSTLFNKEKGNPFIKAKSFGRISMTVAVNVSRFEGIAMAPPDPILGVSEAFRADTDVKKLNLGVGAYRTEELQPYVLDVVKKAENLMLERGENKEYLPIEGLAAFNKVTAELLFGADNPVIKQQRVATVQGLSGTGSLRLAAALIERYFPGAQVLISSPTWGNHKNIFNDARVPWSEYRYYDPKTVGLDFEGMISDIKAAPEGSFVLLHGCAHNPTGIDPTPEQWEKIADVIQEKNHVPFFDVAYQGFASGSLDADASSVRLFAARGMELLIAQSYSKNLGLYAERIGAINVVCSSADAAARVKSQLKRIARPMYSNPPVHGARIVANVVGDPILFNEWKEEMEMLAGRIKNVRQKLFDSLSAKDKSGKDWSFILKQIGMFSFTGLNKTQSENMTNKWHVYMTRDGRISLAGLSLAKCEYLADAIIDSYHNVS

SEQ ID NO: 101 - DNA, 1645 bp, Populus trichocarpa
tactacttgattacgaacattaccacagaacaactccagtatctatagccaacggtttttcaagatggcttcaacaatgatttctttagcttctgctactccttctgcttcactttctgtgcaagaaactctcaagggaaagatgaggcttggaagtagtagtgtgagtacattgtttaacaaggagaaaggcaatccctctatcaagaaaaagtcatttggccggatatctatgactgttgcagtgaatgtatcccgtttcgagggtattgctatggccccccctgatcctatccttggtgtttctgaagcttttagagcagacatagatgtaaagaagctcaaccttggagttggggcctaccgaactgaagagttacaaccttatgtgcttgatgttgttaagaaggctgagaatcttatgctggagaggggagaaaacaaagagtatctcgcaatcgaaggtttggctgcattcaataaggtgactgcagagttactattcggagcagacaaccaagtgatagagcaacaaagagttgcaactgttcaaggtctctcgggcaccggttctcttcgattagctgcagctctcattgagcgatattttcctggagcgcaagttctgatatcgtctcctacttggggtaatcacaagaatattttcaatgatgcaagagttccatggtcagagtaccgatactatgatcccaaaacagttggcttggattttgaggggatgatatcggacataaaggcagcccctgagggatcatttgtgttgctacatggctgtgctcacaacccaactggtattgatccaacccctgaacaatgggagaaaattgctgatgtcattcaagaaaagaaccatattccattttttgatgttgcctaccagggatttgctagtggaagccttgatgcagatgcatcatcagtgaggttgtttgctgcacgtggtatggagcttctggttgctcagtcatacagcaaaaatttgggtttgtatgccgaaagaattggggcgattaatgttgtctgctcatcagctgatgcagcagcaagggttaagagccaactgaaaaggattgcccgaccaatgtactcaaatcctcctgttcatggggctagaattgttgctaatgttgttggggatccagctcttttcaatgaatggaaggcagagatggaaatgatggctgggaggataaaaaatgtgagacagaagctatttgacagtctctctgcaaaagataaaagtgggaaagattggtcttttatactgaagcagattggcatgttttccttcactggcttgaacaaagctcagagcgataatatgaccaacaagtggcatgtttatatgacgaaggatggaagaatatccttggctggactgtctttggccaaatgtgaataccttgctgatgcaattattgactcctaccacaatgtcagttgaaagaatgatgaacaggcattataaccaacaagtaaaaagttttatcactaaactgttttactgagttgatattattttacggaagttttgtaataatgttcactggtatttgactgaaacaaatccatgcaaaccgagttttgataggctgtttattacatcccagctggggctaagcta

SEQ ID NO: 102 - protein, 466 aa, Populus trichocarpa
MASTMISLASATPSASLSVQETLKGKMRLGSSSVSTLFNKEKGNPSIKKKSFGRISMTVAVNVSRFEGIAMAPPDPILGVSEAFRADIDVKKLNLGVGAYRTEELQPYVLDVVKKAENLMLERGENKEYLAIEGLAAFNKVTAELLFGADNQVIEQQRVATVQGLSGTGSLRLAAALIERYFPGAQVLISSPTWGNHKNIFNDARVPWSEYRYYDPKTVGLDFEGMISDIKAAPEGSFVLLHGCAHNPTGIDPTPEQWEKIADVIQEKNHIPFFDVAYQGFASGSLDADASSVRLFAARGMELLVAQSYSKNLGLYAERIGAINVVCSSADAAARVKSQLKRIARPMYSNPPVHGARIVANVVGDPALFNEWKAEMEMMAGRIKNVRQKLFDSLSAKDKSGKDWSFILKQIGMFSFTGLNKAQSDNMTNKWHVYMTKDGRISLAGLSLAKCEYLADAIIDSYHNVS

SEQ ID NO: 103 - DNA, 1863 bp, Phaseolus vulgaris
gcacgaggaactgtcttctctttcttcacttcttctcatcgcccattgtttccttcttcaattctatctctctaagcttcttcaagtgtttcacaaaaacgaatctacttcatcgcatcatcgtcttttctacgcaactcaacttctacaacactcagatccgcacttcacagtgatggcttcttctgttctctccgcagctttgaactctctctctccctcttattctctctcctcgcgccaaacccacaaggggaagcccaagattggaggcaacgctttgagatttaacaagtccttcccaaatgcaaggtctagtggtcgggttatggctgttgcagttaatgggtctcggtttgagggcatacctatggctcctcctgatccaattcttggagtttctgaggcatttaaagcggacacaagtgatgtcaagctcaatcttggagtgggggcataccgaacagaagaactacagccgtatgtgcttaatgttgttaagaaggctgagaatcttatgctggagaggggggataacaaagagtatctctctattgagggtttagctgcgtttaacaaggcaactgcagagttgttacttggagcagacaacccagcaatcaaacagcaaagagttgccactgtccaaggtctttctggaactggttctctgcggctagctgcagctctgatagaaagatattttgctggggctaaagttttgatatcatctcctacctggggtaatcacaagaatattttcaatgatgctagagtgccatggtctgagtacagatattatgatcccaagacagttggcttggattttgagggcatgattgaagatataaagtcagctcctgaaggatcttttgtgcttctacatggatgtgctcataaccctactggtattgatccaacacctgagcaatgggaaaaaatagctgatttaattcaagaaaagaaccacattcccttttttgatgttgcttaccagggctttgctagtggaagccttgatgaagatgcagcttctgtgaggctttttgttgcacgtggtatggaggttcttgtagctcagtcatacagtaaaaatcttggtctctatgctgaaaggattggagcaatcaatgtgatttcatcatccccagaatctgcagcaagggtaaagagccagctgaaaaggctcgcccgaccaatgtactcaaatccacctgtacatggggctagaattgttgccgatgttgttggaaacccagttctctttaatgaatggagagcagaaatggaaatgatggctggaaggatcaagaatgttagacaacagctatacaatagtattacttcaaaagacaacagtggaaaagattggtcatttatacttaagcagataggcatgttctcattcactggcttgaacaaggaacagactgacaacatgacaaataagtggcatgtatacatgacaaaggacggaaggatttccctggcaggattgtcgttggctaaatgtgaataccttgcagatgctattatagactcgtatcataatgtcagctgaaactcggtgaaatatttttggtgagtgttatatccaatcggaaagattgtgagatacatgaaaataatttatgtatgcattaattaattgtcatacatatgtacctcaaagtaccttaggaaattttgtaaccttgttgaaacaaattgactctgtattgacgcataacaagtcggattgtctgacttaaagctagttgaatcagcaccgatttatagtatatttctcatttcatatgggtgagactgaatatcatggtaacaaacttccattggccataatgtcatttcgtggttggtcgg

SEQ ID NO: 104 - protein, 461 aa, Phaseolus vulgaris
MASSVLSAALNSLSPSYSLSSRQTHKGKPKIGGNALRFNKSFPNARSSGRVMAVAVNGSRFEGIPMAPPDPILGVSEAFKADTSDVKLNLGVGAYRTEELQPYVLNVVKKAENLMLERGDNKEYLSIEGLAAFNKATAELLLGADNPAIKQQRVATVQGLSGTGSLRLAAALIERYFAGAKVLISSPTWGNHKNIFNDARVPWSEYRYYDPKTVGLDFEGMIEDIKSAPEGSFVLLHGCAHNPTGIDPTPEQWEKIADLIQEKNHIPFFDVAYQGFASGSLDEDAASVRLFVARGMEVLVAQSYSKNLGLYAERIGAINVISSSPESAARVKSQLKRLARPMYSNPPVHGARIVADVVGNPVLFNEWRAEMEMMAGRIKNVRQQLYNSITSKDNSGKDWSFILKQIGMFSFTGLNKEQTDNMTNKWHVYMTKDGRISLAGLSLAKCEYLADAIIDSYHNVS

SEQ ID NO: 105 - DNA, 1681 bp, Solanum lycopersicum
ccctctgtggtagctttcctgtaaacccaaagtcccgaaacccttgtatgccctcttcttcttttgcgcacttaaatcccagatggcttccacaatgttctctctagcttctgtcactccttcagcttcaatttccttgcaagataatctcaagccaaagctgaagctagggacttctagccaaagggcctttcccaggaaggacttcatgaaggcaaagtcaaatggtcggactactatggctgttgctgttaacgtctctcgatttgagggaataacaatggctccccctgaccccattcttggagtctctgaagcattcaaggctgatacaaatgaactgaagcttaaccttggagttggagcttaccgcacagaggatcttcaaccatatgtcctcaatgttgttaagaaagcagagaaccttatcctggagagaggagaaaacaaagagtatcttccaatagaaggtttggctgcattcaacaaagtcacagcagagttattgtttggaaaagataacccggtgcttcagcaacaaagggtggctacgattcaaggtctatcaggaactgggtcattgcgtattgctgcagcactgatagagcgttacttccctggctctaagattttgatatcatctccaacatggggaaatcataaaaacatttttaatgatgccagagtaccttggtctgaatatcgatattatgatcccaaaacagttggccttgactttgctgggatgatagaagatataaaggctgccccagaaggatcatttatcttgctccacggctgtgcacacaacccaactggtattgatcccacacctgagcaatgggaaaagatcgctgatgtaattcaggagaagaaccacattccattttttgatgttgcctaccagggatttgcaagtggcagccttgacgaagatgcctcatctgtgagaatgtttgctgcacgtggtatggagcttttggttgctcaatcatatagtaaaaatctgggtctctatggagaaaggattggggctattaatgttctttgctcatctgctgatgcagcaacaagggtgaaaagccagctaaagaggcttgctcgaccaatgtactccaatcctcccattcacggtgctaaaattgttgccaatgtcgttggaactccagagctcttcagtgaatggaaagaagagatggaaatgatggcagggaggataaagagtgttagacagaagctatatgatagcctctccgccaaggataagagtggaaaggactggtcgttcattctgaagcagataggaatgttctccttcacaggtctcaacaaagctcagagcgagaacatggccgataagtggcatgtgtacatgacaaaagatgggaggatatccttggctggattatcggctgctaaatgtgaatatcttgctgatgccatcattgactcatactacaatgtgagctaattcttggattttaaagtgacaacagttttgataataatatctgcaggaatttcactgtatacttcattcttcctgttgagcacgtgattctcttaaatcttgtaataattgtttcagcttgtcttcggtttacagaatttatatttgtatgaagcaaattttgacaatttcttaacagttggattctaaaataaagattaatgctagagt

SEQ ID NO: 106 - protein, 462 aa, Solanum lycopersicum
MASTMFSLASVTPSASISLQDNLKPKLKLGTSSQRAFPRKDFMKAKSNGRTTMAVAVNVSRFEGITMAPPDPILGVSEAFKADTNELKLNLGVGAYRTEDLQPYVLNVVKKAENLILERGENKEYLPIEGLAAFNKVTAELLFGKDNPVLQQQRVATIQGLSGTGSLRIAAALIERYFPGSKILISSPTWGNHKNIFNDARVPWSEYRYYDPKTVGLDFAGMIEDIKAAPEGSFILLHGCAHNPTGIDPTPEQWEKIADVIQEKNHIPFFDVAYQGFASGSLDEDASSVRMFAARGMELLVAQSYSKNLGLYGERIGAINVLCSSADAATRVKSQLKRLARPMYSNPPIHGAKIVANVVGTPELFSEWKEEMEMMAGRIKSVRQKLYDSLSAKDKSGKDWSFILKQIGMFSFTGLNKAQSENMADKWHVYMTKDGRISLAGLSAAKCEYLADAIIDSYYNVS

SEQ ID NO: 107 - DNA, 1365 bp, Volvox carteri
cacacatgcgcttcgcgtctctgtagtaattactactctggtcgggtcatgctgtttgcctttaccaaaatgcagcaggtcatttcgcgccgcgtcggcgctcacatttgcgatgtgggtgcctctcgcagccgtcttgccctgcaggtcaggtgcatgagccgctttgctgatgtggctcaggctcctccggacccgatcttgggcgtctcggaggccttccgcgcaagcaccagccctagcaagcttaatctcggcgtgggcgcgtaccgggatgaggatttgaagcctgtcgtgctgagcgtggtgaagaaggccgaggctaagattttctcccgcaatgagaacaaagaatacctgtccattgagggtttcgagcccttccgtaaggccactgtggacctgctgctgggtgctggtcatccggccattaaggagggtcgtgtggcggtgatccagtctctgtctggcaccggctctctgcgtgtgggtgctgccttcatcgcccgcttcctcaagggcgctactgtctacatctccaacccgacctggggcaaccaccgcaacatctttggtgacgagggtgtcaagtgggagtactacaggtattttgatgccgacactgttggtctggacttcaagggccttatggaggacctgaaggcggctccctctggctccgtggtggtgctgcatggctgcgcacacaaccccacgggcgtcgatccgacccccgagcagtggaccgccattgcggacttgtgcaaggagcgcaacctgttgcccttcttcgatgtggcctatcagggcttcgccactggtgacctggacaaggacgcctttgccccccgcctctttgtggaccggggtctggagatcatggtttcccagagctactcgaagaacctgggactgtacggcgagcgtgtgggtgctctggtcatggtgctcaaggacaaggagcctgccactcggtgtctgagccagctgaagcgcctggcccgtgccctgtactcgaacccgccaacccacggagctcgaattgctgctgaggtggtcaatgacaaggagctgttcgaggagtggaagggtgagatgcgcggtatggctggccgcattgagcgggtgcgtggagagctccagcgggctctggaggccaaataccccgacaaggactggtccttcatcaccaagcagattggaatgttcaccttcaccggtctcacgcctgcacaggtggacaacatgaccaacaagcactctgtgttcatgacccgggatggccgcatctccctggccggtctcaactctgccaaggtggagtacctggccaacgctattgttgaatcggtgcgcaactgctaa

SEQ ID NO: 108 - protein, 438 aa, Volvox carteri
MLFAFTKMQQVISRRVGAHICDVGASRSRLALQVRCMSRFADVAQAPPDPILGVSEAFRASTSPSKLNLGVGAYRDEDLKPVVLSVVKKAEAKIFSRNENKEYLSIEGFEPFRKATVDLLLGAGHPAIKEGRVAVIQSLSGTGSLRVGAAFIARFLKGATVYISNPTWGNHRNIFGDEGVKWEYYRYFDADTVGLDFKGLMEDLKAAPSGSVVVLHGCAHNPTGVDPTPEQWTAIADLCKERNLLPFFDVAYQGFATGDLDKDAFAPRLFVDRGLEIMVSQSYSKNLGLYGERVGALVMVLKDKEPATRCLSQLKRLARALYSNPPTHGARIAAEVVNDKELFEEWKGEMRGMAGRIERVRGELQRALEAKYPDKDWSFITKQIGMFTFTGLTPAQVDNMTNKHSVFMTRDGRISLAGLNSAKVEYLANAIVESVRNC

SEQ ID NO: 109 - DNA, 1233 bp, Vitis vinifera
atggctattgcagtcaatacctctcgttttgaaggtgtaacaatggcccctcctgatccaattcttggagtttctgaggctttcagagcagacaatagtgagatgaagctcaaccttggagtcggggcctaccgaacagaagaactccaaccttatgtgcttaatgttgtcaagaaggcagaaaatcttatgctggagagaggagaaaataaagagtatcttccgatcgaaggtttggctgcatttaataaagttacagcagagttattatttggagcaggcaatccagtaattgagcaacaaagggttgcaaccgttcaaggtctttctggaactggttctcttcgacttgctgcggcccttatagaacgatattttcctggggcaaaagttttgatatcatcgccaacatggggtaatcacaagaatattttcaatgatgctagagttccctggtctgaataccgatactatgacccaaaaacagttggcttggattttgatgggatgatatccgatataaaggcagccccagaaggatcttttgtgttgcttcatggctgtgctcacaacccaactggtattgatccaactcctgaacagtgggaaaagattgctgatgtcattcaagagaagaatcacattcctttctttgatgttgcataccagggatttgcaagtggaagccttgatgcagatgcgtcatccgtgagattgtttgctgcacgtggtatggagcttctggttgcccaatcatacagtaaaaatctgggtctttatgcagaaaggattggggcaatcaatgtggtctgctcatcagcagatgcagcagcaagggtaaagagtcagttgaaaaggattgctcgaccaatgtactcaaatcctcctattcatggagctaggattgttgccaatgttgttggtgatccagctctcttcaatgaatggaaagaggagatggaattgatggctggaaggataaagaatgtgagacagaaactatttgacagcctctctgcaaaagataagtgtggaaaggattggtcatttatactaaagcagattggcatgttctcattcacagggctgagcaaagttcagagtgagaatatgacaaataagtggcatgtgtacatgaccaaggacgggaggatctcattggctggattgtctttggccaaatgcgaatatcttgcagatgccatcattgattcatttcactgtgtcagttga

SEQ ID NO: 110 - protein, 410 aa, Vitis vinifera
MAIAVNTSRFEGVTMAPPDPILGVSEAFRADNSEMKLNLGVGAYRTEELQPYVLNVVKKAENLMLERGENKEYLPIEGLAAFNKVTAELLFGAGNPVIEQQRVATVQGLSGTGSLRLAAALIERYFPGAKVLISSPTWGNHKNIFNDARVPWSEYRYYDPKTVGLDFDGMISDIKAAPEGSFVLLHGCAHNPTGIDPTPEQWEKIADVIQEKNHIPFFDVAYQGFASGSLDADASSVRLFAARGMELLVAQSYSKNLGLYAERIGAINVVCSSADAAARVKSQLKRIARPMYSNPPIHGARIVANVVGDPALFNEWKEEMELMAGRIKNVRQKLFDSLSAKDKCGKDWSFILKQIGMFSFTGLSKVQSENMTNKWHVYMTKDGRISLAGLSLAKCEYLADAIIDSFHCVS

SEQ ID NO: 111 - DNA, 1913 bp, Zea mays
gcctctcaaaaaaggaaaaggaaacggaaaaactcccagttcgtgacggagacaccgaggccagcgccatccacccgctcccctccgcgcccggccgcaccgctcccctccgctcggccttcatctccccacagccgcaagcgacgggcgtcatatcccatcctgatctctcctcccttcttcagtgcagcagcaggccagcggcacgccacccgcctcactcccgcctccgatccgctgcttactcgccacccggagatggccaccgccgccgccttctctgtctcctcgccggcggcctccgccgtcgccgcgcgatccaaggtgtttggaggagttaaccaggcgagaactagaactggctgccgcgtcggcatcacgcggaagaactttggccgtgtcatgatggcccttgcagtggatgtttctcgttttgaaggagtgccaatggctcctccagacccaattcttggggtttctgaggcctttaaagcagataaaagcgagctgaagctcaatcttggtgttggtgcctataggacagaagagctgcagccctacgtgctcaatgtagtcaagaaggctgaaaatcttatgttggagaaaggagaaaacaaagagtatcttcccattgaaggtttagccgcgtttaacaaagcaacagcagagctattgcttggagctgataaccctgttattaatcaaggactggttgctacacttcagtctctctcgggcactggatcactgcgtctcgctgcagcattcatacaaagatactttcctgaagctaaagtgctgatatcgtcgcctacctggggtaaccacaagaatatcttcaatgatgctagggtaccttggtcagagtaccggtattatgaccccaagactgttgggttggattttgagggaatgatagctgacattgaggctgctcctgaaggttcttttgttctgctacatggttgtgctcacaacccaactggaatagacccaactcctgaacagtgggagaaaattgcagatgtcattcaagagaaaaagcatatgccattctttgatgttgcatatcagggttttgccagtggaagccttgatgaagatgcattttctgtcaggctttttgttaagcgtggcatggaagtgtttgttgcacaatcttacagcaagaaccttggtttatattctgaaagggttggtgcaataaatgtcgtgtgctcagcaccagaagttgcagatagggtaaagagccagctgaaacgattggcacgtcccatgtactcgaacccccctattcacggtgccaagatagttgccaacgttgttggtgatccaaccatgtttggtgaatggaaacaagagatggagctaatggctggacggatcaagaatgtaagacagaagctctacgacagtttgtctgccaaggacaagagcggcaaggactggtctttcattctgaggcagattggcatgttctcctacaccggcttgaacaaagcgcagagtgacaacatgacggataaatggcatatttacatgaccaaggatgggcggatctcgttagctgggctgtccctggctaagtgtgattatcttgccgacgccatcatcgattccttccataatgtgaactaggctgaggtacgatagttgagggtcaagctattgatgtttagttccgtggacgctaggctgggatttttgggtccttccagctatacagctcttccgttgtgctccatctggtgtaacttggataaataaaaattttgtcgctgaactaaaactcgtgtgcttttttacctgtaactgtaaggtcagcgcgtggctacagacttgtaaacacttgaatggaaaaaaaacaatgacattaccggatattaatggccaactggccggtatgcgaactt

SEQ ID NO: 112 - protein, 459 aa, Zea mays
MATAAAFSVSSPAASAVAARSKVFGGVNQARTRTGCRVGITRKNFGRVMMALAVDVSRFEGVPMAPPDPILGVSEAFKADKSELKLNLGVGAYRTEELQPYVLNVVKKAENLMLEKGENKEYLPIEGLAAFNKATAELLLGADNPVINQGLVATLQSLSGTGSLRLAAAFIQRYFPEAKVLISSPTWGNHKNIFNDARVPWSEYRYYDPKTVGLDFEGMIADIEAAPEGSFVLLHGCAHNPTGIDPTPEQWEKIADVIQEKKHMPFFDVAYQGFASGSLDEDAFSVRLFVKRGMEVFVAQSYSKNLGLYSERVGAINVVCSAPEVADRVKSQLKRLARPMYSNPPIHGAKIVANVVGDPTMFGEWKQEMELMAGRIKNVRQKLYDSLSAKDKSGKDWSFILRQIGMFSYTGLNKAQSDNMTDKWHIYMTKDGRISLAGLSLAKCDYLADAIIDSFHNVN

SEQ ID NO: 113 - DNA, 1701 bp, Arabidsopsis thaliana
ggccattttctaagcaacttgtgcgactctccttcgtcctcatctgccaaaaacttcgtacgagtcgctacttctctctctatatataaactccttaccactctctttttctgattttttgacgttaagagatagaaacagagagagatagagagatagagttatggctttggcgatgatgatccgaaacgcagcttcgaagcgaggaatgactccgatctccggtcatttcggtggtttgagatctatgtcttcatggtggaagagcgttgagcctgctcctaaagatccgatcctcggagttaccgaagcttttctcgctgatcctagtcctgaaaaagttaatgttggtgtgggagcatatcgtgatgataatgggaagcctgttgtcttggaatgtgtcagagaagctgagaaaaggcttgctgggagcactttcatggagtaccttcctatgggaggaagtgccaaaatggtggacctaacattgaagcttgcctatggggacaatagtgaatttatcaaagataaaagaattgctgcagttcagactctgtctggcactggagcctgccggctctttgcagacttccagaaacgtttttctcctggttcacagatctacattcctgttccaacctggtccaaccaccacaacatctggaaagatgcacaagtccctcaaaagacatatcattactatcatccagaaaccaagggcttggatttctcagcattgatggatgatgtgaagaatgctccggaagggtcattcttccttcttcatgcttgtgctcataatcctactggagtagaccctacagaggaacaatggagagagatatcacagctattcaaggctaaaaagcatttcgcattcttcgatatggcttaccaaggttttgctagtggagatccagcgagagatgccaagtccatcaggatctttcttgaagatggtcatcatattggaatttctcagtcctatgcaaaaaacatgggactctacggccagagggtgggatgtctcagtgtgctttgtgaagatccgaagcaagccgtggctgtgaaaagtcaattgcagcagctagctagaccaatgtacagcaacccacctttgcatggtgctcagctggtctcaaccattcttgaagacccagagttaaagagtctgtggctaaaagaagttaaggtcatggctgataggatcatcggcatgagaactactttgcgagaaagccttgagaagttaggatcgcctttgtcatgggagcacgttaccaaacagattggaatgttctgctacagtgggttaacaccagaacaggttgaccgcttaacaagcgaatatcacatctatatgacccgtaacggccgtatcagtatggctggtgttacaacaggaaacgtgggataccttgcgaatgctatacatgaagtcaccaagtcatcttaaatcatttacttacatgtttcagccaaacatacaaattttgtttgaagagtcaataagacaggaggctagatttgtacttctgcaattggttttgtgggaactgaaagtttacccataaacagtaatttattagcgcattttttcgttagctgggcaataaaagcaaagcctaaacgatggatttttggatatacaaaattcggattgttttctttcttctcaattgctctttttgtgcttgtttc

SEQ ID NO: 114 - protein, 430 aa, Arabidsopsis thaliana
MALAMMIRNAASKRGMTPISGHFGGLRSMSSWWKSVEPAPKDPILGVTEAFLADPSPEKVNVGVGAYRDDNGKPVVLECVREAEKRLAGSTFMEYLPMGGSAKMVDLTLKLAYGDNSEFIKDKRIAAVQTLSGTGACRLFADFQKRFSPGSQIYIPVPTWSNHHNIWKDAQVPQKTYHYYHPETKGLDFSALMDDVKNAPEGSFFLLHACAHNPTGVDPTEEQWREISQLFKAKKHFAFFDMAYQGFASGDPARDAKSIRIFLEDGHHIGISQSYAKNMGLYGQRVGCLSVLCEDPKQAVAVKSQLQQLARPMYSNPPLHGAQLVSTILEDPELKSLWLKEVKVMADRIIGMRTTLRESLEKLGSPLSWEHVTKQIGMFCYSGLTPEQVDRLTSEYHIYMTRNGRISMAGVTTGNVGYLANAIHEVTKSS

SEQ ID NO: 115 - DNA, 1731 bp, Citrus sinensis
ggggggggggggaggggggggccccccgcattcgaggtccgttgcaacaacttggaacgccgcccaataaacacctgacttggcagttggcacatcctcaaagccaagtatattaccaaaatctttcatcgcttattcttttaagattagagcgaaagaagaagaaaaatccaattcatttacatgggcgatgcggagcttgatatcggagcgggtctcgtgtcggagctctgttttaggagctagatggatgtcgtcgtggtggcggaacgtggagcccgctcctaaggatccgattctcggcgtcactgaagctttcttggcagatcccagtcctgataaagtcaatgttggagtcggagcttatcgagatgataatggaaagccagttgttcttgaatgcgtcagagaagcagagcggagaattgctggaaccgccaacatggagtatcttcctatgggagggagtgtgaaaatggtggaggaaactctgaagctcgcctatggagataattctgagttcatcaaggataaaaggatagcagctgtacaatctctctcagggactggtgcatgccgactttttgcagactttcagaagcgttttcatcctgattctcaaatctacatacctgtcccaacatggtccaaccaccataacatctggagagatgcccatgtcactcaaaggacttttcattactatcaccctgggactaagggtttagattttgcagcactgatggatgacattaagaatgcaccaaatggttcattctttctacttcatgcttgtgctcacaatcccactggagtggatccttcagaggaacaatggaaagagatctcataccaaattaaggcaaaaggtcacttcccattctttgacatggcgtatcagggttttgccagtggtgatccggagagagatgccaaggccatccgaatttttctcaaggatggtcacctacttggattagcccagtcatatgcaaaaaatatgggactctatggccaaagagtaggatgccttagtgtgctatgtgaagatgaaaagcaagcagtggctgttaaaagtcagttgcagcagcttgccaggcccatgtacagcaatcctcctgttcatggtgcactcatagtctcaaccatccttggagatgcagaattgaagaaattatggctcaaggaagttcagggcatggcagatcgcatcattggaatgcgaactgcgcttcgagaaaacctcgagaaattgggatcacccttatcatggaaacacataactaatcagattggtatgttttgctatagtgggttgacgcccgaacaggtggatcgtctaacagatgaatatcacatctacatgacgcgaaatggtcgtatcagcatggccggagtaactacaggcaatgttggatatcttgcaaacgctattcatgaggtcacaaaatctgcttagtttgtttacaaaagctgcatatcaattttgtaggcagccatatatacacaggggcacaatgcaatacaataaatttttgaaatattctttccattcccttcatgactgggggaaagacaattataacggacatcgtttatttttgctctttcacaggagctgctttccctctttttaagtttgttttgtttaggagggaggagagagcctttgaattatctcattcttgtataataaacttctggtcgctactatctatgataccggggcaa

SEQ ID NO: 116 - protein, 422 aa, Citrus sinensis
MRSLISERVSCRSSVLGARWMSSWWRNVEPAPKDPILGVTEAFLADPSPDKVNVGVGAYRDDNGKPVVLECVREAERRIAGTANMEYLPMGGSVKMVEETLKLAYGDNSEFIKDKRIAAVQSLSGTGACRLFADFQKRFHPDSQIYIPVPTWSNHHNIWRDAHVTQRTFHYYHPGTKGLDFAALMDDIKNAPNGSFFLLHACAHNPTGVDPSEEQWKEISYQIKAKGHFPFFDMAYQGFASGDPERDAKAIRIFLKDGHLLGLAQSYAKNMGLYGQRVGCLSVLCEDEKQAVAVKSQLQQLARPMYSNPPVHGALIVSTILGDAELKKLWLKEVQGMADRIIGMRTALRENLEKLGSPLSWKHITNQIGMFCYSGLTPEQVDRLTDEYHIYMTRNGRISMAGVTTGNVGYLANAIHEVTKSA

SEQ ID NO: 117 - DNA, 1766 bp, Glycine max
gctctctccctctctgttcgcactctgtctttcccctgtttccgcgtcactgagtcatggcgattcgcaactcgctcaccggccaattcctccgccgcagctccgtcgccggagcaaggctcatgtcttcttcgtcctcatggttccggagcatcgagcccgctcccaaggatcctatcctcggagtcactgaagctttcctcgccgatcagagtccaaacaaagtcaacgtcggagtgggtgcgtatcgcgatgaccacggaaaacctgtggttttggaatgtgttagagaagcagagaggagggttgccggaagtcaattcatggagtatcttcccatgggtggaagcataaaaatgatagaagaatcgctgaagctggcatttggagacaactctgagttcatcaaggataaaagaatagctgcagtgcaggctttatctgggactggtgcatgtcgactttttgctgcatttcaacagagatttcatcctaatacccaaatctatataccagtgcctacctgggccaaccaccataacatttggagagatgctggagtgcctatgaagacattccgttactatcaccctgagtctagaggattggatttttcaggactgatggatgacataaagaatgctccagatggttccttctttctgcttcatgcttgtgctcataatcctactggagtagatccttcagaagaacaatggagagagatctcttcccagataaaggctaagggtcatttccctttctttgacatggcatatcaaggttttgctagtggtgatccagagagagatgcaaaagccataaagatttttcttgaggatggtcatttaataggacttgctcagtcatatgcaaaaaatatgggactgtatggccagcgagcaggaagcctgagtgtgctttgtgaagatgagaaacaagctgtggctgtaaaaagtcagttgcagctgattgctagacccatgtacagtaacccacctctccatggagcacttatagtttctactgtccttggtgatccagatttgaagaagttatggcttaaagaagtcaaggttatggcagaccgcatcatcggaatgaggactacactacgagaaaacttagaaaagaaggggtctactttgccatggcagcatataactaatcagattggtatgttctgctacagtggattgacacctgaacaggttgatcgtatgacaaacgagtttcatatttacatgacccgtaacggtcgtatcagtatggctggtcttaatacgggcaacgttggatatgttgctgacgctatccatgaggttacaaaatcattctagattattcaatcacccaacaggtgaccaaatttttgtctttggagacaaacatctcagaagtagtacccttatccaggggagcaaaataaatttaataaagtctgacaaattttcaacttgtttcggggtaagatagtgatactcttcagggtttaccttgcatattgaagacccttattgcaatacgtatccgatttatcatatccatgcaccatagattatatccatttttacagacatcttgtttagcactttaatgagcataaccctgtatcatcattttttttataaaataatttgagtagtagattgaataagggctttatttatggtgaacaggaagtacgtagcttcattcttactacactattattcctgttagtgaaactttgcgattgttgaagctagaatggatatttaaatgct

SEQ ID NO: 118 - protein, 427 aa, Glycine max
MAIRNSLTGQFLRRSSVAGARLMSSSSSWFRSIEPAPKDPILGVTEAFLADQSPNKVNVGVGAYRDDHGKPVVLECVREAERRVAGSQFMEYLPMGGSIKMIEESLKLAFGDNSEFIKDKRIAAVQALSGTGACRLFAAFQQRFHPNTQIYIPVPTWANHHNIWRDAGVPMKTFRYYHPESRGLDFSGLMDDIKNAPDGSFFLLHACAHNPTGVDPSEEQWREISSQIKAKGHFPFFDMAYQGFASGDPERDAKAIKIFLEDGHLIGLAQSYAKNMGLYGQRAGSLSVLCEDEKQAVAVKSQLQLIARPMYSNPPLHGALIVSTVLGDPDLKKLWLKEVKVMADRIIGMRTTLRENLEKKGSTLPWQHITNQIGMFCYSGLTPEQVDRMTNEFHIYMTRNGRISMAGLNTGNVGYVADAIHEVTKSF

SEQ ID NO: 119 - DNA, 1735 bp, Gossypium raimondii
ctggattggattggattggattcgattagcccccctcatttaatcttatttcatttcattgatataaccgagagaaaatcctccgataacgccattgtcgcgcttttcttcactttctgtttcaactacgaacttctttgttggtgactaaatggcgatccgaagagctatgtctggtcgcatcatggatcggacggccgtcgttggtgcgcgatacatgtcatcgtggtggcgtagcgttcaacccgctcccaaggatcctattcttggtgttacggaggcttttttggccgatcaaagtgccgataaagttaatgttggagtcggtgcttaccgtgatgataatggaaagccagttgttttggaatgtgttagagaagccgagcgaaggattgctgggaatttgaacatggaatatcttcctatgggaggaagcgtgaagatggtggaagaaacactgaagttggcctatggtgagaattctgagttgataaaagaaaaaaggatagcagcagttcaagctctgtctgggactggtgcatgccgactttttgcagactttcaaaagcgtttttgtcctgactcccaaatctatataccagtccctacttgggccaaccaccacaacatttggagagatgctcaggtccctcagaaaacctaccattattatcacccagagtcgaagggtctagattttgcagcaatgatagatgacattaagaatgctccaaatggctcattctttctacttcatgcatgtgctcataaccccactggtgtggatccttcagaggagcagtggagagaaatctcacaccacatcaaggcaaaaggtcattttgccttctttgacatggcgtatcaaggctttgctagtggtgacccagagaaagatgcaaaggccatcaggatttttcttgaggatggtcatcacataggaattgcacaatcatatgcaaaaaacatgggactctatggccagagggtaggatgcctcagtgtgctttgtgaagatgaaaaacaagcagtagctgtaaaaagtcaactgcaacagcttgcgagacctatgtacagcaacccacctgttcatggtgctctcatagtttcaaccattcttagtgatccagacttgaagaaacaatggctgaaagaagttaaggtcatggctgatcgcataattggaatgcgaactgctttacgagggaaccttgaaaagctcggttctccattatcatggcagcacattactaatcagataggaatgttttgctatagtgggttgacaccagaacaagtggatcgcttgacgaacgaatttcacatctatatgactcgcaatggtcgaatcagtatggctggtgttacaacgggcaatgtcgaatatttggcaaatgcgattcatgaagtcacaaaatgaggttagaatcatagctgatattgatccttcaaaagatttttggtgtgtttgtaaggacaattaaaggagcattgatagaagctgaacttaaggtttctgcattgaataaatactatgactagaataggaaagaggtaaagattggatctgtacctgatttggcctacaaaggatggatagttcatttccttactagttacaacttttaataattcaagcaactcgtatgtatctttgcttgagaaacaaaacaatgtaactaattaatgccaattccgttcatttctctatggtaggtaggttaaaattcccagc

SEQ ID NO: 120 - protein, 422 aa, Gossypium raimondii
MAIRRAMSGRIMDRTAVVGARYMSSWWRSVQPAPKDPILGVTEAFLADQSADKVNVGVGAYRDDNGKPVVLECVREAERRIAGNLNMEYLPMGGSVKMVEETLKLAYGENSELIKEKRIAAVQALSGTGACRLFADFQKRFCPDSQIYIPVPTWANHHNIWRDAQVPQKTYHYYHPESKGLDFAAMIDDIKNAPNGSFFLLHACAHNPTGVDPSEEQWREISHHIKAKGHFAFFDMAYQGFASGDPEKDAKAIRIFLEDGHHIGIAQSYAKNMGLYGQRVGCLSVLCEDEKQAVAVKSQLQQLARPMYSNPPVHGALIVSTILSDPDLKKQWLKEVKVMADRIIGMRTALRGNLEKLGSPLSWQHITNQIGMFCYSGLTPEQVDRLTNEFHIYMTRNGRISMAGVTTGNVEYLANAIHEVTK

SEQ ID NO: 121 - DNA, 1718 bp, Hordeum vulgare
cgcgtccgccggcccgccgcaaccagcacgcagatttccttcctacctttcccctcccctcccatcccctcccctgctccggcgaccggcaagccggccaagaagcccaacgcttacccctcaagccggatccgccatggcgctgtaccgccgcgcggcctccgcgatccggcggcgcggggccgcgcctctccccatgctcccggcgcgggccatggcgtcgctcttcggccacgtcgagccggcgcccaaggaccccatcctcggcgtcaccgaggccttcctcgccgacccctcccccgacaaagtcaacgtcggcgtcggcgcctaccgggacgacgacggcaggcccgtcgtgctcgactgcgtgcgcgaggcggagcgccggatcgccggcaacctcaacatggagtaccttcccatgggagggagtatccacatgattgaagagtcgctaaagctggcgtatggtgaggactccgagttcatcaaagataaaagaattgcagcggtgcaggcactttcaggaactggcgcatgccggctcttcgctgatttccagaagcgtttcctgccggattcgcagatctacatacctacaccaacgtggtccaaccatcataatatttggagggatgctcaagtgccgcagaggacattctcatattaccacccggaatcgagagggcttgactttgcaggattgatggatgatatcaagaatgctccaaatggttctttctttttgcttcatgcatgtgcccataatcctactggagtagatcccactgaggaacaatggcgagaaatatcctatcagttcaagttgaagaaccatttcccattctttgacatggcataccaaggatttgctagcggtgatccagagagggatgccaaggcaatccgtatattccttgaagatggacaccaaattggatgtgctcagtcatatgcaaagaacatgggtctttatggacagagagcgggatgcctgagtattctctgcgaggatgagatgcaagcagttgctgttaagagccaattgcaacagattgcgagaccaatgtacagcaacccacctgttcatggtgcgctggttgtttctattatccttaatgatccagaattgaagaacttatggttgggagaggtcaagggtatggctgatcgtatcattggaatgcggaaggcacttcgggagaatcttgaaaagttaggttcacctttatcatgggagcatgtcaccaatcagattggaatgttttgctacagtgggatgacgcctgaacaagtcgaccgcttgacaagtgaataccatatctacatgacacgcaacgggagaataagcatggccggcgtaacgacgggcaacgtctcctacttggctaatgccattcatgatgttaccaagtgaaatcgaggaccatcttcagcgaatggagcgaaaggggttttccctttgttactggggctattcattctatactgtcatgctagagaaataagttctaggaagtaaacctgttgcggctgtccaacaacggaaaattctacctgtatgtatggagaagcagagacgtcccgacttatttttgccagattatcttattgtgattctagtcacattcgaatgaaacgccagtggaaaatgcttggttataccttgattttaacaagatgctggaggacttcaaactcgacgaaatcaaacattg

SEQ ID NO: 122 - protein, 426 aa, Hordeum vulgare
MALYRRAASAIRRRGAAPLPMLPARAMASLFGHVEPAPKDPILGVTEAFLADPSPDKVNVGVGAYRDDDGRPVVLDCVREAERRIAGNLNMEYLPMGGSIHMIEESLKLAYGEDSEFIKDKRIAAVQALSGTGACRLFADFQKRFLPDSQIYIPTPTWSNHHNIWRDAQVPQRTFSYYHPESRGLDFAGLMDDIKNAPNGSFFLLHACAHNPTGVDPTEEQWREISYQFKLKNHFPFFDMAYQGFASGDPERDAKAIRIFLEDGHQIGCAQSYAKNMGLYGQRAGCLSILCEDEMQAVAVKSQLQQIARPMYSNPPVHGALVVSIILNDPELKNLWLGEVKGMADRIIGMRKALRENLEKLGSPLSWEHVTNQIGMFCYSGMTPEQVDRLTSEYHIYMTRNGRISMAGVTTGNVSYLANAIHDVTK

SEQ ID NO: 123 - DNA, 1646 bp, Hordeum vulgare
cggcacgaggctcttctccagcagagcggcagcctcgccacgcgccgcgcgcgcgcagcaaccggcatggcgatgtctcgcgccgccgcggccgtccggcagcgccgacgcgtgccgctcctgcccgcggcgaggtccatggcgtcgtggttcgggcacgtggagccggcccccaaggaccccatcctcggcgtcaccgaggccttcctcgccgacccctcgccggacaaagtgaacgtcggcgtcggcgcgtaccgggacgacgccgggaagcccgtggtgctggagtgcgtgcgcgaggcggagcggcgaatcgccgggagcaccaacatggagtaccttccgatgggaggaagcgtgaagatgattgaggaatcgctgaagctggcatacggggaggattctgagttcatcaaggacaagaggatcgcggcagtgcaggctctttcggggactggtgcatgtcgcctctttgcagatttccagaagcgcttcttgcccgattcacacatctacattcctactcctacatggtcaaaccatcacaacatttggagggatgcccaggtaccacaaagtgcatttgcctactaccatccagaatcaagaggactggactttgcaggcctgatggatgatatcaagaaagctccagagggttccttctttttgcttcatgcatgtgctcacaatcccacgggggttgatccttctgaggaacaatggagagagatatctcaacagtttaaggtgaagaaccatttcccatttttcgacatggcataccaaggatttgctagtggtgacccagagagagatgccaaggctattcggatctttcttgaagacggacaccaaattggatgtgcacagtcgtatgcaaaaaacatgggactttatggccaaagagcaggatgccttagtatcctctgcgacgatgaaatacaagcagttgctgtgaagagccaattgcaacagattgccagacctatgtacagcaacccaccccttcatggcgcactaattgtttccactatccttggggatccagcactgaaaagcttatggctcaaagaggtcaagggtatggctgatcgcattattggaatgcgaaaagcacttaaggatagtcttgaaaagttgggttcaccattatcatgggaacatattactaatcagattggtatgttttgctacagcgggatgacgcctgaacaagttgatcgcttaacaaatgaattccacatatacatgactcgtaatggcaggataagcatggctggtgtgacaacaggaaatgtcgcctatttggctaacgctattcatgaggtcactaagccaaattaagacatgttcctccggccattttgagaaataagaggagcctttcaacttcaagttgcaatttgcttttaatttcctttaaccttttctgaccatgatatggtcaggtagacaaataagtatgttccaatactgttgtttttctcaaagaatgtatcatattgttgtgacctatgggtgtgcaaatattgatttgtttcactgcaggcacataaaggaacactttttgtaagaactagaatgatcctatattacagttgcaaatgatgccctaacacagaaaatgtcatcattttaaaaac

SEQ ID NO: 124 - protein, 426 aa, Hordeum vulgare
MAMSRAAAAVRQRRRVPLLPAARSMASWFGHVEPAPKDPILGVTEAFLADPSPDKVNVGVGAYRDDAGKPVVLECVREAERRIAGSTNMEYLPMGGSVKMIEESLKLAYGEDSEFIKDKRIAAVQALSGTGACRLFADFQKRFLPDSHIYIPTPTWSNHHNIWRDAQVPQSAFAYYHPESRGLDFAGLMDDIKKAPEGSFFLLHACAHNPTGVDPSEEQWREISQQFKVKNHFPFFDMAYQGFASGDPERDAKAIRIFLEDGHQIGCAQSYAKNMGLYGQRAGCLSILCDDEIQAVAVKSQLQQIARPMYSNPPLHGALIVSTILGDPALKSLWLKEVKGMADRIIGMRKALKDSLEKLGSPLSWEHITNQIGMFCYSGMTPEQVDRLTNEFHIYMTRNGRISMAGVTTGNVAYLANAIHEVTKPN

SEQ ID NO: 125 - DNA, 1388 bp, Ostreococcus lucimarinus
ccggcgcgctcgggccggcgcatgctcgcgcgcgcgaccgcgcagatcgtgcaccgccgcgcgcgcgacgcgggcgccgcgctcgcgaagcgaacgttgggaaaagaaataagcgcgacgcgtcgaagcgaccgcacgacgacgacgacgcgcgcgatgtcgcgattcggggacgtcccggaagcgccgaaggacccgatcctggggatttcggagatgtttaacgcggacgcgcacgcggagaagatgaatctcggggtgggggcgtatcgggatgataacggtaagcccgtggtgttgaattgcgtgcgcgaggcggagaagcgcatcgcggggaactttaacatggagtatttgcccacgaacgggtcgaaggatttcgttcagcagtctttgaaattggcgttcggggagaattccgcgcacgtcgccgacggtagcatcgccgccgttcagtcgttgtctggcacgggctcgtgccggttgatggcggagttccaacggcgattcatgccgggctgcaaggtgtacatcaccgtgccgacgtggagtaatcaccacaacatttggcgcgacgccgggtgcgaacaagacacgtttcgttattacaaggaatcaacgcgcgggctcgatttcgaagggatggtcgaagacatccaaaacgccccggacggaagcatgttcttgttgcacgcgtgtgcgcacaatccgactggcgtcgatccttcggcggagcagtggcgcgaaatttccaaagtcatgaaggcgaagaatcacttcgccttcttcgacatggcgtaccaaggcttcgcctcgggcgattgtgaacgtgatgcgcaagcgatcagaatctttgttgaagacggacataaggtcgcgctcgcacaatccttcgcgaagaacatgggcttgtacggccaacgcatcggcaccgtgagcgtgatgtgcaaagataaggaagaagccaaccgtgtcgagtcgcaactcaaggtgatcgcgcgtgcgatgtactcgaacccacccatgcacggtgcgctcatcgcttccacgattctcggcgatgccgcgctcaaggcgcagtggtacgaggaagtgaagggcatggcggatcgcatcatcaaaatgcgaacgctcttgcgtaagaacctcgaagaaagcggttcgacccttccgtggcagcacgtcaccgaccaaatcggtatgttctgcttcagtgggatgactggcgagcaagtggataaattgcgaaccgaccatcacatctacatgactcgtaacggcagaatttctatggcgggcgtgacgagctcgaacgtcggtcgcttagccgcggcgatgcacgaagtgacgaaatagagtttcaataagcacgacgatacgataatcga

SEQ ID NO: 126 - protein, 444 aa, Ostreococcus lucimarinus
MLARATAQIVHRRARDAGAALAKRTLGKEISATRRSDRTTTTTRAMSRFGDVPEAPKDPILGISEMFNADAHAEKMNLGVGAYRDDNGKPVVLNCVREAEKRIAGNFNMEYLPTNGSKDFVQQSLKLAFGENSAHVADGSIAAVQSLSGTGSCRLMAEFQRRFMPGCKVYITVPTWSNHHNIWRDAGCEQDTFRYYKESTRGLDFEGMVEDIQNAPDGSMFLLHACAHNPTGVDPSAEQWREISKVMKAKNHFAFFDMAYQGFASGDCERDAQAIRIFVEDGHKVALAQSFAKNMGLYGQRIGTVSVMCKDKEEANRVESQLKVIARAMYSNPPMHGALIASTILGDAALKAQWYEEVKGMADRIIKMRTLLRKNLEESGSTLPWQHVTDQIGMFCFSGMTGEQVDKLRTDHHIYMTRNGRISMAGVTSSNVGRLAAAMHEVTK

SEQ ID NO: 127 - DNA, 1763 bp, Oryza sativa
atcaaagcgagacaccttttcttttggcctccttcctcgcgaaaaccaccaaaccaaaacccacacacccacagcttttctccccctcactgctttgctctccagtctccacctcctcctcctcgctgccgcgccgcccatccgccagccatggcgatgtcgtcgtcccgctcggcggccgcgatccgggggcggcgggtcggggcgctggcgagggcgaggaggcacgcgacgagggcgatggcgtcgctgttcggccacgtcgagccggcttccaaggaccccatcctcggcgtcaccgaggccttcctcgccgacccctcccccgacaaagtcaacgtcggcgtcggcgcctaccgggacgacaacggcaagcccgtcgtgctcgagtgcgtgcgcgaggccgagcgccggatcgccggcaacctcaacatggagtaccttccaatgggaggaagtataaagatgattgaagagtcactaaagctggcatatggtgaggattctgatttcatcaaagataagaggattgctgcggtgcaggctctttcaggcacaggtgcatgccggctctttgccgatttccagaggcgtttcttgccaaattcacagatctacatacctacacctacatggtccaatcatcataacatttggagggatgctcaagtacctcaaaggacattcacctattaccatccagagtcaagagggcttgatttcgcaggactgatggatgatattaagaacgctccaaatggttcattctttttgcttcatgcttgtgcccataatcctactggagttgatcctacagaagaacaatggagagagatatcctaccaattcaagataaagaatcatttcccattctttgacatggcataccaaggatttgccagcggtgatccagagagagatgctaaggcaatccgaatcttccttgaagatgggcatcaaattggatgtgctcagtcatatgcaaagaacatgggactgtatgggcaaagggcagggtgcttgagtattctgtgtgaggatgagatgcaagcagtttctgttaagagccaattgcaacagattgcaaggccaatgtacagcaacccacctgttcatggtgcactggttgtctccataatccttaatgatccagaattaaagagtttatggttgaaagaggtcaagggtatggctgatcgaatcattggaatgcggaaggcactccgggaaaatctcgaaggcctaggttcaccattgtcatgggatcacatcaccaatcagattggaatgttctgctacagtgggatgacacctgaacaggtggatcgcttaaccaatgaataccatatttacatgacccgtaatggcagaataagcatggctggtgtaacaacaggaaatgtggcgtatttggctaatgctattcatgaggtcactaaaacgaaatgaagctacttcctcttccctcttcggccaatgaaatgaggcttgcaagcggcggcgttttttttttggggggtggtctattgacctttaagatggttgtactagagaaataatccagtgaacatgctggtgtttctccaacttcggattttccctgtatggaggagagaactagaaacctacccaattttgagagctatagatgccgatcctgttatttcaatcgtcagatgttatgcctgtggcagcctggcaggtcacctcagaaacagagatatgtgaaagagaataaatgcaaatgagctgagcattttgac

SEQ ID NO: 128 - protein, 432 aa, Oryza sativa
MAMSSSRSAAAIRGRRVGALARARRHATRAMASLFGHVEPASKDPILGVTEAFLADPSPDKVNVGVGAYRDDNGKPVVLECVREAERRIAGNLNMEYLPMGGSIKMIEESLKLAYGEDSDFIKDKRIAAVQALSGTGACRLFADFQRRFLPNSQIYIPTPTWSNHHNIWRDAQVPQRTFTYYHPESRGLDFAGLMDDIKNAPNGSFFLLHACAHNPTGVDPTEEQWREISYQFKIKNHFPFFDMAYQGFASGDPERDAKAIRIFLEDGHQIGCAQSYAKNMGLYGQRAGCLSILCEDEMQAVSVKSQLQQIARPMYSNPPVHGALVVSIILNDPELKSLWLKEVKGMADRIIGMRKALRENLEGLGSPLSWDHITNQIGMFCYSGMTPEQVDRLTNEYHIYMTRNGRISMAGVTTGNVAYLANAIHEVTKTK

SEQ ID NO: 129 - DNA, 1670 bp, Oryza sativa
gcgatgcacacacgcagccgtcggcttggtttcccccccctgaatccaagtcacctcctcctcacacctcaccttccccctctctcctccgatcgcgcgcgcatggcgatgtcacgagccgccgccgctgccgcggggactcccgtggcgcggcggcgattgatgggggccgtggcggcgaggtcgatggcgtcgtggttcggccacgtggaaccggccgccaaggaccccatcctcggcgtcaccgaggcgttcctcgccgacccctccccggacaaagtcaacgtcggcgtcggcgcgtaccgggacgacagcgggaagcccgtggtgctggagtgcgtgcgcgaggcggagcggcggatcgccgggagcatgaacatggagtaccttccaatgggtggaagcataaagatgattgaagaatcacttaaactggcctatggggagaactgtgagttcatcaaggacaagaggatcgcagcagtgcaggctctttcaggaactggtgcatgtcgcctctttgcagatttccagaagcgtttcttgccagattcacagatttatatacccacacctacatgggccaaccatcacaatatttggagggatgcccaagtaccacaaaagacatttacctattaccatccagagtcaagaggacttgactttgcaggcctaatggatgatatcaagaatgctccagatggttcattctttttgcttcatgcttgtgcgcataatcccactggagtagatccttcagaagaacaatggagggagatatctcatcagttcaaggtgaagaaacattttccattcttcgacatggcataccaaggatttgctagtggtgatccagagagagatgccaaggcaattcgaatatttcttgaagatggacatcaaattggatgtgcacagtcatatgcgaaaaacatgggactttatggacaaagagcaggatgccttagtattctatgtgatgatgagatgcaagcagttgctgttaagagccagttacaacagattgctagacctttgtacagcaacccacccgttcatggtgcattaattgtttcaactattcttggtgatccggagttgaaaagtttatggctgaaagaggtcaagggtatggctgatcgtatcattggaatgcgaacagcactcaaagagaaccttgaaaagttgggttcaccaatgtcatgggaacatatcactaatcagattggaatgttctgctacagtggtatgacacctgaacaagtcgatcgcttgacaaaagagttccatatctacatgactcgtaacgggcggataagcatggctggagtaacaacaggaaatgttgcctatctggctaatgctattcatgaggttaccaagacaaagtgagagtgttggagacattcctatcatcattttcagtacctttttaccgaccgcaaaatgggtcaaatggtgaaataaaattgtagtccgatatgatgtgaaataaaatggctggtaagctagaaaagggcaagtttattttttgaggacaagacttttgctgtaccagtgaaaacattttttaggacaagactttacagttagaacgaacgttctaactgtgacagtgtcatgctttgtaaaggaagtgtacctttccaccgatgggcatttttgat

SEQ ID NO: 130 - protein, 463 aa, Oryza sativa
MHTRSRRLGFPPLNPSHLLLTPHLPPLSSDRARMAMSRAAAAAAGTPVARRRLMGAVAARSMASWFGHVEPAAKDPILGVTEAFLADPSPDKVNVGVGAYRDDSGKPVVLECVREAERRIAGSMNMEYLPMGGSIKMIEESLKLAYGENCEFIKDKRIAAVQALSGTGACRLFADFQKRFLPDSQIYIPTPTWANHHNIWRDAQVPQKTFTYYHPESRGLDFAGLMDDIKNAPDGSFFLLHACAHNPTGVDPSEEQWREISHQFKVKKHFPFFDMAYQGFASGDPERDAKAIRIFLEDGHQIGCAQSYAKNMGLYGQRAGCLSILCDDEMQAVAVKSQLQQIARPLYSNPPVHGALIVSTILGDPELKSLWLKEVKGMADRIIGMRTALKENLEKLGSPMSWEHITNQIGMFCYSGMTPEQVDRLTKEFHIYMTRNGRISMAGVTTGNVAYLANAIHEVTKTK

SEQ ID NO: 131 - DNA, 1206 bp, Ostreococcus taurii
atggcgcggttcgccgacgtcccggaggcgccgaaggacccgatcctggggatcagcgagttattcttggcggatacgtcgagcgacaagatgaatctcggggtggtgcgtggtgcgtatcgggatgataatggtaagcctcaggtgctgaagtgcgttcgcgaggcggagaagcgaatcgcggggaactttaatatggagtacctgccgacgaacggcttcaaggatttcatcaagcactcgctcgatctggcgtacggtgaagattctgaggccgtgaagagcgggtccatcgccgcggtgcaatcgctctccggtaccggttcttgtcgtcttctcgcggagtttcaaaagcgattcatgccgggatgcacggtttacatcagtgtcccgacgtggagcaaccaccacaacatttggcgcgacgccgggtgcgagcaaaccacgtaccgttactacaaggaatccacgcgtggtcttgatttcgagggcatgatggaagacatcaacaacgcgccgaatgggagcatgttcctcctgcacgcgtgcgcgcacaacccgaccggcgtcgatccgtcggcggagcagtggcgcgaaatttccaaggctatgaaggcaaaaaaccacttcgcgttcttcgacatggcctaccaaggttttgcgtccggcgactgcgtgcgagacgcgcagtcgattcgcatcttcgctgaggatggtcacaagttcgccctcgcgcagtcctttgcgaagaacatgggcttgtacggtcagcgcatcggtaccgtgagcgtcatgtgcgaggacaaggctgaggccgtccgcgttgagtcacagctcaaggtcatcgctagagcgatgtactcgaacccgccaatgcacggtgcactcatcgcgtcgacgatcctcggcgatcctgcgctcaaggcgcagtggtacgtggaggtgaaggagatggctgaccgcatcatcaccatgcgaacgctccttcgcaagcatctcgaagactccggatccaagctgccttggcaacacgtcaccgatcaaatcggtatgttttgctacagcgggatggcgccggagcaagtggacaagctgcgaaccgaccatcacatttacatgacgcgcaacggacgcatctccatggcgggcgtgacgagcggaaacgtcgagcgcttggccaaggcgatgcatgaggtgacgaagtag

SEQ ID NO: 132 - protein, 401 aa, Ostreococcus taurii
MARFADVPEAPKDPILGISELFLADTSSDKMNLGVVRGAYRDDNGKPQVLKCVREAEKRIAGNFNMEYLPTNGFKDFIKHSLDLAYGEDSEAVKSGSIAAVQSLSGTGSCRLLAEFQKRFMPGCTVYISVPTWSNHHNIWRDAGCEQTTYRYYKESTRGLDFEGMMEDINNAPNGSMFLLHACAHNPTGVDPSAEQWREISKAMKAKNHFAFFDMAYQGFASGDCVRDAQSIRIFAEDGHKFALAQSFAKNMGLYGQRIGTVSVMCEDKAEAVRVESQLKVIARAMYSNPPMHGALIASTILGDPALKAQWYVEVKEMADRIITMRTLLRKHLEDSGSKLPWQHVTDQIGMFCYSGMAPEQVDKLRTDHHIYMTRNGRISMAGVTSGNVERLAKAMHEVTK

SEQ ID NO: 133 - DNA, 2130 bp, Physcomitrella patens
gcggtgacccgatcaccgagttcgtagtttccacgggtcttatcaggatggtcgttgctggcaagcgacgtcacgggttctcgttcgtcggggaagagaaattctcgtcgacgagggtgggggggggacgatcctcgttgttctagagaacgagagccgacgaacgaagcccgtaaggctgaggtcaggcaccgtcttgcacccggactgggacggcgcctcaggagcgccttgctcttgtcgtcatcccctgcgagaccccctgttttcacgagccttctgcccccgccgttgcaggggtcgccgttttgttccgctcggcgcctcttcctgcctgcattgggctttctatcgagctttggatgttcttttgagctgcagtgttcaggggcttctcatcgctcgtctcgtctcgcctgcgtgaggaagcttagttgattggattttgcaaagatggcgggtgcgatggccgctcggagcagcaggcgcttcatgagcactgcctccaaatcgtggttcgggcatgtgcagcccgcgcccaaggaccctatcctgggcgtcacggaggcgtttctcgctgattctcacccggataagatgaacgtcggcgttggggcgtaccgtactgatgagggcaaaccattggtattggaatgcgtgcgtaaagctgaagaaaagattgccggttccaacttcatggagtaccttcccatggggggtgatatctctttcaacaatcatagcatgaagttggcttacggagaagatgctggcgtattagctgacaaaagagtggctgccgtccaagccctatcaggaactggtgcatgccgtctcttcgccgacttccaaaagcgattcatgccagagtctcaagtttttatccccgttccaacgtggtccaaccatcacaacatctggagggatgccaacgttcctcagaacactttccgttactatgacgcagctaccaagggcctcgacttcaagggcctcatggaggatgtgaagaaagctcccaatggttcagttttcctattgcacgcttgtgcacacaacccgactggtgtagacccatctccagagaactggaaggagatttctgcattttttaaggaaaaaggccatttcgccctttttgacatggcataccaagggtttgcttccggtgatacggaaagggacgcccaggctatccgcattttcttgaacgatggtcatcaaattgcatgtgcacagtctttcgcaaagaacatgggtctttatggccagcgtgttggatgtctcagtgttgtgtgcgacgatcctcaacaagcagttgccgtgaagagtcagttgcagctgattgctcgccctatgtactccaaccctcccttgcatggtgctttgcttgtgtccaccattttggaggaccctgaacttaagtccctctggtacaaagaagttaagggaatggctgaccgtatcatcggcatgcgtgagacactccgtaccaatcttgagaaggctggatctcagcacagctggaagcatatcactgatcagattggtatgttttgcttcagcggtttgaagcctgagcaagtagatcgtttaacgaaggatttccatatctacctcacacgcaatggccgcatcagtatggccggtatcactacttccaatgtggaatatcttgctaatgccatccacgaggtttccaagaactaggaggtttccaaggactaggaggttgagaaagcttgagattttccaagccacattggttagttacagagcgaggtttgtgtaccattccttcttgcatacatgtgcatgagttttttttctcagtatagcaaaaggaatcgacgagcagcattgataaccatttttggaactgatcagaagagagaaataagcgcaggcctgttggagtctggccccacacgggattcaccctccatttagttcttgggctacaaatctagagtagacccaatatacattgtgttgtttctggagtgaatatcaggaaacactagtcttcttttgtcagtgttgagttatttcgacaaggtgccgttctctggcaaatcacggactgcttgtattttgcgctatgtttcatgaaattacttcttggcactc

SEQ ID NO: 134 - protein, 418 aa, Physcomitrella patens
MAGAMAARSSRRFMSTASKSWFGHVQPAPKDPILGVTEAFLADSHPDKMNVGVGAYRTDEGKPLVLECVRKAEEKIAGSNFMEYLPMGGDISFNNHSMKLAYGEDAGVLADKRVAAVQALSGTGACRLFADFQKRFMPESQVFIPVPTWSNHHNIWRDANVPQNTFRYYDAATKGLDFKGLMEDVKKAPNGSVFLLHACAHNPTGVDPSPENWKEISAFFKEKGHFALFDMAYQGFASGDTERDAQAIRIFLNDGHQIACAQSFAKNMGLYGQRVGCLSVVCDDPQQAVAVKSQLQLIARPMYSNPPLHGALLVSTILEDPELKSLWYKEVKGMADRIIGMRETLRTNLEKAGSQHSWKHITDQIGMFCFSGLKPEQVDRLTKDFHIYLTRNGRISMAGITTSNVEYLANAIHEVSKN

SEQ ID NO: 135 - DNA, 1812 bp, Picea sitchensis
ggagattgcgccattagcttattgcacaggagtaacagaaaggaggaaatcatggccatggcgatggcgatgagcagatccaatgcgggaaggggcataagattgatgtccacttcaggatggtggaaagctgtggagccagctcccaaagaccctattctcggagtcaccgaagcctttttagcggatacagatcctaacaaggtcaatgttggcgtgggtgcttatcgcgatgatcaagggaagccagtggttcttcaatctgtgcgtgaggccgagcgtcgtattttgggcaaagaaaacatggaatatctacccatgggagggagtgtgaagatggttgaagaatctatcaaacttgcatatggagaaaatgcagatgtcttgaaagataagcgtgtcgcagctgtccaagctctatctggcactggtgcttgccgtctttttgcagagtttcagaagcgttttcgacctgagtctcagatttacataccagtccctacctgggccaatcaccacaatatctggagagatgccaatgtaccgcagaggactttccattattaccatccagagactaggggtttagactttgcatctctcatggatgatgtgaagaatgctcccaatggttcctttttcttgcttcatgcatgtgctcacaatcccacaggtgtagatccaacagaggagcaatggaaggaaatttcttatcaattcaaggtgaaaaatcattatcccttctttgacatggcttatcaaggttttgcaagtggtgatactgacagagatgctaaggcaatcaggatattcttggaggatggtcaccagattgcatgtgcacaatcttttgcaaaaaatatgggcttgtatggacagagggtaggttgtctaagtgttatatgcgatgatgcaaaacaggcagttgcagttaagagccagcttcaacagattgctcggccaatgtacagcaatccacctgttcatggggctcttcttgtatattccatcctgagtgatccagatctcaaggctctctggcacaaggaggttaaggttatggcagaccgcattattggaatgagagaagctttgcgaggcaaccttgaaaatctggggtctcctctcagttggaaccacgttactgaccagattggaatgttttgctatagcggtatgactccagagcaagttgaccgtttgacgagtgaatttcatatttatttgacacgaaatggccgcataagtatggcaggtgttactacaggcaatgttgaatacttggcaaatgctatccacgaggtcacaaagtcatcagaaaaagagctaaaagctggtgcagtttaactctaatttttggcaaagatctatcacaattttattattgcatgatatatgagaattatagggcttagtttgatttttgtgctagtgcaccactattggatatacctttgaataagtggcctattgttcaggcatagtcattaacaaacttaacttttgtactccatttaaggggtgcagtcggtttctcatgaaagtgtaggataaacatttgctggtgcaccactattggagatacctttgaataagtggcctattgtgtaggcatagttattaacaaacttaggttttgtattccgtttaaggggtgcagtcggtttctcatgaaagtgtaggataagcatttgaggcttttggtggaccttttatggtggtattctgtcaaaagtacagttcacaaacctatgtacttgccgttctcattaagtgcgatgtgattaaattttgaagttcttttgatctagt

SEQ ID NO: 136 - protein, 431 aa, Picea sitchensis
MAMAMAMSRSNAGRGIRLMSTSGWWKAVEPAPKDPILGVTEAFLADTDPNKVNVGVGAYRDDQGKPVVLQSVREAERRILGKENMEYLPMGGSVKMVEESIKLAYGENADVLKDKRVAAVQALSGTGACRLFAEFQKRFRPESQIYIPVPTWANHHNIWRDANVPQRTFHYYHPETRGLDFASLMDDVKNAPNGSFFLLHACAHNPTGVDPTEEQWKEISYQFKVKNHYPFFDMAYQGFASGDTDRDAKAIRIFLEDGHQIACAQSFAKNMGLYGQRVGCLSVICDDAKQAVAVKSQLQQIARPMYSNPPVHGALLVYSILSDPDLKALWHKEVKVMADRIIGMREALRGNLENLGSPLSWNHVTDQIGMFCYSGMTPEQVDRLTSEFHIYLTRNGRISMAGVTTGNVEYLANAIHEVTKSSEKELKAGAV

SEQ ID NO: 137 - DNA, 2015 bp, Pinus taeda
ggacggggcactgcgccattatattattgcacagcaataacagaaaggtaaaaaatcatggcgatggcgattgcgatgagcagatccaatctgggaaggggcataagattgatgtccacttctggatggtggaaaactgtagagccagctcccaaagaccccattctcggagttaccgaagcctttttagcagatacagatcctagcaaggtcaatgttggcgtgggcgcatatcgtgatgatcatgggaagccagtggttcttcaatgtgtgcgcgaggctgagaggcgtattatgggcaaagaaaacatggaatatctacccatgggaggaagtgtgaagatggttgaagattctatcaaacttgcatatggagaaaatgcagatgtcttgaaagataagcgtgttgcagcagtccaagctctatctggcactggtgcttgccgtctttttgcagatttccagaaacggtttcgccccgagtctcagatttacataccggtccctacctgggccaatcaccacaacatctggagagatgcccatgtgccgcagagaactttccattattaccatccagagactaagggtttagactttgcatctctcatggatgatgtgaagaatgctcccaatggttcctttttcttgcttcatgcatgtgctcacaatcccacaggtgtagatccaacagaggagcaatggaaggaaatttcttatcaatttaaggtgaaaaatcactttcccttctttgacatggcttatcaaggttttgcaagtggtgacacggacagagatgctaaggcaatcaggatattcttggaggatggtcaccagattgcatgtgcacaatcttttgcaaaaaacatgggcttgtatggacagagggtaggttgtctaagtgttatatgcgatgatgcaaaacaggcagtggcagttaagagccagcttcaacagattgctcgaccaatgtacagtaatccacctgttcatggggctcttattgtatcttccatcctgagtgatccagatctcaaagctctctggcacaaggaggtcaaggttatggcagaccgtattattggaatgagaaaagctttgcgaggcaaccttgaaaagctggggtctcctctcagttggaaccatgtcactgaacagattggaatgttttgctatagtggtatgactccagagcaagttgaccgcttgacgagtgaatttcacatttatatgacacgaaatggccgcataagtatggcaggtgttactaccggcaatgttgaatacttggcaaatgctatcaacgaggtcacaaagtcatcagaaaaagagatgaaagttggtgcaatttaaatctaattttttgcaaacatcacaattttattactgcatcatcatatgagaattttagatcttagtttgatttttgtgctagtgcactgccattggagacaccttggaataagtagcctattgtttaggcatagtcattagcaaacttagtttttgtactccgttttaggggtacagtaggtttctcatgatagtgtaggattaacgtttgctagtgcactgctattggagatacctttgaataagtggcctattgtttaggcatagtcattaacaaaaatagttttgtactccatttaaggggtgcagtcggtttctcatgaaagtgtaggatacagatttgaggtttttttatggacgtttccttttatcgttgtattctgtcaagagaacaattcacatacctgtgtactttcctttctcaaaaagtgggatgttattaaattttgaagtattttactctacctgcggttctctatttgttggctagagctggaaacttattcagtggtcacaagaggagtgtcatgtctaggagaggagaatgcagatctccttttgagttctttgttatttctgtttaatcataaatgtgaaccaagttgataatgatatctattggttagccttttcttgggtattttaattaaaggagaatggtt

SEQ ID NO: 138 - protein, 431 aa, Pinus taeda
MAMAIAMSRSNLGRGIRLMSTSGWWKTVEPAPKDPILGVTEAFLADTDPSKVNVGVGAYRDDHGKPVVLQCVREAERRIMGKENMEYLPMGGSVKMVEDSIKLAYGENADVLKDKRVAAVQALSGTGACRLFADFQKRFRPESQIYIPVPTWANHHNIWRDAHVPQRTFHYYHPETKGLDFASLMDDVKNAPNGSFFLLHACAHNPTGVDPTEEQWKEISYQFKVKNHFPFFDMAYQGFASGDTDRDAKAIRIFLEDGHQIACAQSFAKNMGLYGQRVGCLSVICDDAKQAVAVKSQLQQIARPMYSNPPVHGALIVSSILSDPDLKALWHKEVKVMADRIIGMRKALRGNLEKLGSPLSWNHVTEQIGMFCYSGMTPEQVDRLTSEFHIYMTRNGRISMAGVTTGNVEYLANAINEVTKSSEKEMKVGAI

SEQ ID NO: 139 - DNA, 1272 bp, Vitis vinifera
atggcgtttagaacgggaatttccagaaggatgatgattaggtcggggtttggacttcgatcgatgtcttcgtggtgggggagcgtggagcccgctgccaaagatcccatccttggtgttactgaagctttcttggccgatcccagtcctgataaagtcaatgttggagttggtgcctaccgcgatgataatgggaagcctgttgttcttgaatgcgttagagaagcagagcggaggatcgccgggaaattaaacatggaatatcttcccatgggaggaagtgtgaacatggttgaagaaacactgaagttggcatatggagagaactctgaattcatcaaagataagcggattgcagcagtgcaggctctctctggaactggtgcttgccgacttttcgcagacttccaaaagcgttttcggcctgactcccaaatttatataccagtcccaacctgggctaaccatcataacatctggagagatgcccaggtccctcaaaggactttccattactatcatccagagacaaagggtttagattttgcatcactgatggatgatgtaaagaatgctccaaatggatcattctttctacttcatgcttgtgctcataaccctactggagtggatccttcagaggaacaatggaaagagatctcataccagttcaaggtcaaaggtcattttgccttctttgacatggcatatcaaggttttgctagtggtgacccagagagggatgccaagtccatcaagattttccttgaagatggtcatctaattggcattgcccaatcgtatgcaaaaaacatgggactctatggccagagagtgggatgcctaagtctgctctgtgaagatgaaaagcaagcagtggctgtcaagagtcagttgcagcagattgctagacccatgtacagtaatccacctgttcaaggtgctctcattgtgtcaactattcttggtgatccagaattgaagaaattatggctcaaggaagttaaggttatggcagatcgcattattggaatgcgaactgctttacgagaaaacctagagaagttggggtcccccctgtcttgggagcacattactaaccagattggcatgttctgctacagtggtttgacacctgaacaggttgatcgaatgacaaatgaatttcatatctacatgactcgcaatggtcgcatcagtatggcaggtattacaactggaaatgtctcatatttggctaatgccatccatgaagtgtcaaaatctgcttag

SEQ ID NO: 140 - protein, 423 aa, Vitis vinifera
MAFRTGISRRMMIRSGFGLRSMSSWWGSVEPAAKDPILGVTEAFLADPSPDKVNVGVGAYRDDNGKPVVLECVREAERRIAGKLNMEYLPMGGSVNMVEETLKLAYGENSEFIKDKRIAAVQALSGTGACRLFADFQKRFRPDSQIYIPVPTWANHHNIWRDAQVPQRTFHYYHPETKGLDFASLMDDVKNAPNGSFFLLHACAHNPTGVDPSEEQWKEISYQFKVKGHFAFFDMAYQGFASGDPERDAKSIKIFLEDGHLIGIAQSYAKNMGLYGQRVGCLSLLCEDEKQAVAVKSQLQQIARPMYSNPPVQGALIVSTILGDPELKKLWLKEVKVMADRIIGMRTALRENLEKLGSPLSWEHITNQIGMFCYSGLTPEQVDRMTNEFHIYMTRNGRISMAGITTGNVSYLANAIHEVSKSA

SEQ ID NO: 141 - DNA, 1284 bp, Vitis vinifera
atgcaaaggaggaggatgatgatcaagtgggcacgtgatactgtgagaagaagattcatgtcaacctcagccgctgccattgattggtgggatcatgtgggtcacgcccctaaggaccccatcatgagtgttactgaggcttttctttctgataccagccccaacaagatcaatcttggagtgggggcttacagggatgatgatggaagacctgtggttcttcagtgcgttagagatggggaggtaaagattgcgggcaccgagttcctggagtcagtttcagcttcagttagttcaaaactagtcgaggagagtgtcaagttgatttatggaaaggaggcagatttcataaaagaaggaagatttgcgggggtccaagctctctctggcactggtgcttgccgtctctttgctgagtttcagaggcgtttctatcctcaatcaagaatatatttacccattccaacttggtccaaccaccataacatctggagagatgcccaagttccagggagaaccttccattactaccatcctgactctaagggattacactttgctgcacttatggacgatatcaagaatgctccagatcgttcctttttcttgctccatccttgtgctcacaacccaacaggggttgacccaactgaggaacaatggagagagatctcaaatcttttcaaggtaaaaaatcattttcccttctttgacatggcttatcaaggtttcgctagtggggaccttgacaaggatgccaaggctatccggatatttcttgaagatggacatttaataggctgtgctcagtcctttgctaaaaatatgggattatatgggcacagagtgggctgtctcagtgttctttgtgtggatgcaaagcaagcagttgcaattaaaagccaactacagcatattactagggcaatgtacagcagccctcctgtccatggcatattactggtttcaacaatcttgagtgacccacatctaaaggagctttggaaaaaagagctgaaggtaatggcaaaccgcattcataggatgcggtccactctacatgaaagtctcaagaagctgggttctcccctaaactgggatcacatgactaaccaggttgggatgttttgcttctctggcttatccccggatcaggttaatagactggtgaaggaattccatatatacatgacttatgatggtcgcataagtatggcaggtgtgactacaagcaatgtgagttacttggcaaatgcaatacatgaagttactaaatttggctga

SEQ ID NO: 142 - protein, 427 aa, Vitis vinifera
MQRRRMMIKWARDTVRRRFMSTSAAAIDWWDHVGHAPKDPIMSVTEAFLSDTSPNKINLGVGAYRDDDGRPVVLQCVRDGEVKIAGTEFLESVSASVSSKLVEESVKLIYGKEADFIKEGRFAGVQALSGTGACRLFAEFQRRFYPQSRIYLPIPTWSNHHNIWRDAQVPGRTFHYYHPDSKGLHFAALMDDIKNAPDRSFFLLHPCAHNPTGVDPTEEQWREISNLFKVKNHFPFFDMAYQGFASGDLDKDAKAIRIFLEDGHLIGCAQSFAKNMGLYGHRVGCLSVLCVDAKQAVAIKSQLQHITRAMYSSPPVHGILLVSTILSDPHLKELWKKELKVMANRIHRMRSTLHESLKKLGSPLNWDHMTNQVGMFCFSGLSPDQVNRLVKEFHIYMTYDGRISMAGVTTSNVSYLANAIHEVTKFG

SEQ ID NO: 143 - DNA, 1344 bp, Aureococcus anophagefferens
atgggctggtcgtcgactgcactcgtgcttgcgctcgtcgcgtgcgccaatgcgctcgtcccgcccgtgcaacgacgcggttccccggcgctcgcatcgacggccacgccgccggagctctcggtgctcgtcgaaggcctcaagccgtcggcgaccgtggaggtccacggcctgaccatgcagctgcgcgccgcgggcgaggaggtcgtgagcctctgcgtcggcgagccggacttcccgccgcccaaggccatcgtcgacgccatcggcgccgcggcgctcgccggcgcgacgcgctacaccgaggtcacgggcacgaaggagctgcgggaagcgatcgcgtcggacctcgcgaagcgcaagggcacggcctacgcgccgacggacatcgtcgtcgccaacggcgccaagcaggccgtctacgaggcgctcctcgcgctcgtcgggcccggcgacgaggtcgtcgtgcccgcgccgtactgggtgtcgtacccgtcgatggtcgagatggcgggcgccgccgtcgtccaggtcgacgcggacatcgccgacggctacaagctcacggccgacgccttgaagagcgtgctgacgccgaagacgaaggcgctcatcttctgcaacccgtcgaacccgacgggcgccgtcgtcgacgaggcgggccagcgcgagctgctcgcggtcttggacgcgcacgaggccgccacgggcaagaaggtctgggtcatcagcgatgagatctacgagcagctccactacgagcccgccacgccccacgcgtccttcgcggcgctcggcgggtcgtcgttcgaccgcaccgtgaccatcaacggcttctccaaggcctacgcgatgacgggcttccgcctcggctacctcgcggcgccccaggccgtcgcccgggcctgcggcaagattcagggccagatcacgtcctgcgcgtcgtcgctcgcgcaggccgcgggcgtcgcggcgctgaacctgcccgccggcgcgctcgacggcgacgtcgcggagttcaagcgccgccgcgacctcgtgctcgcgcagctggaggccatcgcggcgaagcgggggcgcatccgctgcccgccggcgcccgagggcgccttctacgtcttcgtggacgtctcgggcacgctcggcctctcgtgcgacggcgacgccgtcgactcgtcgacgtcgttctgcacggcgctcctggccaagcgcaagctcgccctcgtgcccggcgacgccttcggcgcgcccgacggcgtgcgcatctcctacgcggcgtccgaggcggagctcacgaccgcgctcgcggcgatcgacgcgttcgtcaacgacgactgtaactag

SEQ ID NO: 144 - protein, 447 aa, Aureococcus anophagefferens
MGWSSTALVLALVACANALVPPVQRRGSPALASTATPPELSVLVEGLKPSATVEVHGLTMQLRAAGEEVVSLCVGEPDFPPPKAIVDAIGAAALAGATRYTEVTGTKELREAIASDLAKRKGTAYAPTDIVVANGAKQAVYEALLALVGPGDEVVVPAPYWVSYPSMVEMAGAAVVQVDADIADGYKLTADALKSVLTPKTKALIFCNPSNPTGAVVDEAGQRELLAVLDAHEAATGKKVWVISDEIYEQLHYEPATPHASFAALGGSSFDRTVTINGFSKAYAMTGFRLGYLAAPQAVARACGKIQGQITSCASSLAQAAGVAALNLPAGALDGDVAEFKRRRDLVLAQLEAIAAKRGRIRCPPAPEGAFYVFVDVSGTLGLSCDGDAVDSSTSFCTALLAKRKLALVPGDAFGAPDGVRISYAASEAELTTALAAIDAFVNDDCN

SEQ ID NO: 145 - DNA, 1744 bp, Arabidsopsis thaliana
attttcttaacattgttccaccaactcctcccacattctctccgcctctctcgtttacaaatcccacctcaaaggtcgactctttatctctcttctcaccaacccaacttctccaatggcttctcagagttcagtcgccgtcatttcctccgccgccgccagaggtgaatcattcccagattcaaagaaaccaatcgggtcagttcggttccaacaacccctccgtctctccttctcgtactgtaagtcagggaatatgtcatctagaatctgcgctatggccaaaccaaatgatgctgagactctttcatcatcagtagatatgtcacttagcccgcgagttcagtccttaaaaccttccaagactatggttataaccgatcttgcagccactcttgttcaatccggtgttccggttattagactagctgcgggagaacccgatttcgacactcccaaagtcgtagctgaggctgggatcaacgcgattcgagaaggttttactaggtatacgttaaatgcaggtattacagaactcagagaagcaatatgtcgaaagctaaaagaggagaatggattgtcttatgcgcctgatcagatcttggttagtaatggagctaaacaaagtctcttacaagcagtgcttgcagtttgttctcctggagatgaagttataattcctgcaccgtattgggtgagttacacagaacaggcgagattggctgatgcaacgcccgtggttattcctaccaagatttctaacaattttttgttggatccaaaggatcttgagtctaaattgactgaaaaatctagacttcttattctctgctctccttccaaccctactggatctgtttaccccaagagtttgctcgaagagattgcacggatcattgctaagcatccaagacttctggtgctttcggatgaaatatatgaacacattatttatgcacctgcaacacacacaagctttgcttctttgcctgacatgtatgaaagaactttgacagtaaacggtttctcaaaggctttcgcaatgacgggttggaggcttggatatcttgctggtcctaaacatattgtggcagcttgcagtaaattacaaggccaggttagttcaggagctagtagcattgctcagaaagcaggtgttgctgcgcttgggttaggcaaagctggaggagaaacggttgcagagatggttaaagcttatagagaaagacgagatttcttggttaaaagcttaggtgatatcaaaggtgttaagatctctgaacctcagggagctttttatctctttattgacttcagtgcttactatggatcagaagctgaaggttttggtttgatcaatgattcgtcgtctcttgcactatactttcttgacaagtttcaggttgcaatggttcctggtgatgcttttggagatgatagttgtatccgaatatcttatgccacatctctcgacgttcttcaagcagctgttgagaagatcaggaaagcccttgagccactccgtgccactgtctccgtttaacagttcggacacagaaatgtgtttaagattgtttatgatatgttgtaacttatttatcagctttgtctccaatccaataaaaagtctttttctatgctttgttcgttccttcaaattcatatataaccataaacaattatcttaattgtaaatcatttattagtatttaaggttgcttgtgtaataaggttatatccgatt

SEQ ID NO: 146 - protein, 475 aa, Arabidsopsis thaliana
MASQSSVAVISSAAARGESFPDSKKPIGSVRFQQPLRLSFSYCKSGNMSSRICAMAKPNDAETLSSSVDMSLSPRVQSLKPSKTMVITDLAATLVQSGVPVIRLAAGEPDFDTPKVVAEAGINAIREGFTRYTLNAGITELREAICRKLKEENGLSYAPDQILVSNGAKQSLLQAVLAVCSPGDEVIIPAPYWVSYTEQARLADATPVVIPTKISNNFLLDPKDLESKLTEKSRLLILCSPSNPTGSVYPKSLLEEIARIIAKHPRLLVLSDEIYEHIIYAPATHTSFASLPDMYERTLTVNGFSKAFAMTGWRLGYLAGPKHIVAACSKLQGQVSSGASSIAQKAGVAALGLGKAGGETVAEMVKAYRERRDFLVKSLGDIKGVKISEPQGAFYLFIDFSAYYGSEAEGFGLINDSSSLALYFLDKFQVAMVPGDAFGDDSCIRISYATSLDVLQAAVEKIRKALEPLRATVSV

SEQ ID NO: 147 - DNA, 1691 bp, Brassica napus
ccggaatttccgggtcgacgatctcgttctcgtctacatattccccctaaagctcgactctttcaccaacccactttctccaaatgtctactcagacctccgccgccgtcatttcctcctccgtcgccgccgctagagtcgaaccatacccagattcaaagaagccaatcgggtcaatccgtttccaacctcttcctctctccctctcgtactgtagtaagtcagggaaggtttcatctagaatctgcgccatgtccaaaccaaatgatgcagagactctctcttcagtagatacttcacttagccctcgtgtcaaatccttgaaaccttccaagaccatggtcataaccgatctcgccgcaactctggttcagtccggtgttcccgttgtcagactagctgctggagaacccgatttcgacactcctaaaatcgttgctgaggctgggatcaacgcgattcgagatggtttcactaggtattcgctgaatgcaggtattacagaactcagagaagctatatgtcggaagctaaaagaggagaatggattgtcttatgcaccggatcagatcttggttagtaatggagcgaaacaaagtatcttacaagcagtgcttgcagtttgttctcctggtgatgaagttataatccctgcaccgtattgggtaagctacacagaacaggcgagattggctgatgcaacacctgtgattattcctacaaagatctctgataacttcttgttggatccaaaggttcttgagtccaaactgactgagaaatctagacttcttatcctctgctctccttctaaccctactggttctgtttaccccaagagtttgcttgaagagattgcacggatcattgctaaacacccaaggcttatggtgctatcagatgaaatatatgaacatattatatatgcgcctgcaacacacacaagctttgcttctttgcctaacatgtatgaaagaactttgacagtaaacggtttctctaaggcttttgcaatgacgggttggaggcttggatatcttgctggtcctaaacatatagtggcagcttgcagtaaattacaaggccaggttagttcaggagctagtagcatttctcagaaggcaggtgttgctgcacttgggttaggaaaagccggaggagagattgtagctgagatggtgaaagcatacagagagagacgtgatttcttggttaaaagcttccgtgaaatggaaggtgttaagatctctgaacctcagggagctttttatctctttattgacttcagtgcatactatggatcagaagctgaaggttttggtttgatcagtgactcatcctctcttgctttatactttcttgacaagtttcaggttgcaatggttcctggagatgcgtttggggacgatagttgtattcggatatcatacgccacatctctcgatgttctacgagtcgcagttgacaagatcaggaaagcccttgagcccctgcgtgccactgtttctgtgtaacggttcggacagtaacgtgtgttttaagcgtttatgtgatgttgtataaactatatatgtatccactttgtcttacgctttgcccccttcaagttcatgtagccctcaaccatgttcttcattgtacatcaatttaaagcccgaagtagaagcttgtgtgtgtcgtgcacaaaaaaa

SEQ ID NO: 148 - protein, 476 aa, Brassica napus
MSTQTSAAVISSSVAAARVEPYPDSKKPIGSIRFQPLPLSLSYCSKSGKVSSRICAMSKPNDAETLSSVDTSLSPRVKSLKPSKTMVITDLAATLVQSGVPVVRLAAGEPDFDTPKIVAEAGINAIRDGFTRYSLNAGITELREAICRKLKEENGLSYAPDQILVSNGAKQSILQAVLAVCSPGDEVIIPAPYWVSYTEQARLADATPVIIPTKISDNFLLDPKVLESKLTEKSRLLILCSPSNPTGSVYPKSLLEEIARIIAKHPRLMVLSDEIYEHIIYAPATHTSFASLPNMYERTLTVNGFSKAFAMTGWRLGYLAGPKHIVAACSKLQGQVSSGASSISQKAGVAALGLGKAGGEIVAEMVKAYRERRDFLVKSFREMEGVKISEPQGAFYLFIDFSAYYGSEAEGFGLISDSSSLALYFLDKFQVAMVPGDAFGDDSCIRISYATSLDVLRVAVDKIRKALEPLRATVSV

SEQ ID NO: 149 - DNA, 1305 bp, Chlamydomonas reinhardtii
atgtctgccgctgctgcgcctgctggcgctgttaaggtggacacaacgttgaacccgctggttgcatccgtgaagccttcaaagacgatggcgctcacggacctggctacctctatgaaggagtctggcattgatgtgatcggcctggctgccggcgagcccgacttcgacacgcccgccgccatcgtggaggcgggtgtggcggcgctgcggcagggctacacgcgctacacgcccaacaccggcacctcggcgctcaggaaggcgatttgcaagaagctcaagggtagggcgggcggggtgggtgtgcgtgggagtgtgtgggtggcttatgaaaagggcaaggcgtgtggcaagagtgggagagctgctacagacatctgcactcgggggggggcggggggcttgttggcaccctcgcatgagacgtacgaagcgctgtccacaagggcaggggcaagggcgctaaggttgcccactcgggttcccgtgtcgcacgcactcacgcactcaccggagctcgaccgcgctccaccccacacgcccacacgcccacgcagccgcctgctcatcctgtgcacgccctccaaccccaccggcgccgtctaccccaaggagcacctggaggcgctagccgccgtgatcgccaagcaccctcggctgctggtgctgagcgacgagatctacgagtacatcacctacgcccccgccacccacgtcagcttcggagcgctgcccggcatgttcgagcgcacactcaccgtcaacggcttctccaaggcctacgccatgacgggctggcgcctgggctacctggcggcgcccaagcactacgccaaggccgccgccatcatccagtcgcagtccaccagcggcgcctcctccatcagccagcaggcggcgctggcggcgctggcgctggggcccggcggcggcgagccggtgcaggccatggtgcgcgccttccgcgagcgaagggactacgtgtcggcgcggctcaaggccatccccggcgtgaacctggctgagcccgccggcgccttctacgtgctgcccgagatgagcgccttcttcgggccgggcgccgcggcacagggcttcggggccgtgcccgacagcgacaccttctgccgctacctgatcgaggtggccaacgtggcggtggtgcctggcgacgccttcggcgcggacagctgcatccgcatctcctacgccgccagcctggagacgctgggcaaggcgctggaccgcatcgccgccgccctggacccggcggtgtacaccttgcgcaccgacaggcagtga

SEQ ID NO: 150 - protein, 434 aa, Chlamydomonas reinhardtii
MSAAAAPAGAVKVDTTLNPLVASVKPSKTMALTDLATSMKESGIDVIGLAAGEPDFDTPAAIVEAGVAALRQGYTRYTPNTGTSALRKAICKKLKGRAGGVGVRGSVWVAYEKGKACGKSGRAATDICTRGGAGGLLAPSHETYEALSTRAGARALRLPTRVPVSHALTHSPELDRAPPHTPTRPRSRLLILCTPSNPTGAVYPKEHLEALAAVIAKHPRLLVLSDEIYEYITYAPATHVSFGALPGMFERTLTVNGFSKAYAMTGWRLGYLAAPKHYAKAAAIIQSQSTSGASSISQQAALAALALGPGGGEPVQAMVRAFRERRDYVSARLKAIPGVNLAEPAGAFYVLPEMSAFFGPGAAAQGFGAVPDSDTFCRYLIEVANVAVVPGDAFGADSCIRISYAASLETLGKALDRIAAALDPAVYTLRTDRQ

SEQ ID NO: 151 - DNA, 1582 bp, Gossypium hirsutum
tctcttcaatcttcggacaaatggcagtttctcttcataactcaacaggaatttccggtgttggcttcgactcaaaatttttgggatcacattctgcttccaaggcctccgtttccgtgtctttccattcctctattactaatctttccttaaaatctgttgagacttctaaacaacagtcatatagaataactgcaatgtcaaagacagagagtagcagcgaccaagtgaaacttgatatctctttgagccctagagttaactctgtgaagccttcaaagacagtggctataactgatcatgcaactgctcttgcacaagctggtgtccctgtcattcgattggctgctggagagcctgattttgatacaccagccatcatagctgagactgggataaatgctattcgtgaaggttacacaaggtacactcccaatgcaggtactttggaacttcgtacggcaatttgtcataagctaaaagaggagaatggaatctcttattcgcatgatcaaattgtggtcagtaatggtgctaaacagagtatccctcaagcagttcttgcagtttgttctcctggggatgaggtaataattcctgctccatattgggtgaagtacccggaaatggcaaggctggctgacgcaacacctactattcttccgacactcatctgtgacaattttctattggatccagaggtccttgagtctaaaatctctgcaaagtcaagactgttgatcctatgctctccatcaaatccaactggatctgtttaccctaagaagctgcttgaaaaaattgcagaaattgtagcaaagcatcccaggcttctggtgctgtctgatgaaatatatgagcatataatctatgcaccggcaactcacacaagctttgcatcattgccaggcatgtgggagcggactctaacagtcaatggcttttccaaggcttttgcgatgactggttggcgacttggatacattgctggacctaaacactttgtcgcagcatgtaataagatccagagtcagtccacttcaggagctagtagtatagcacaaaaagcaggagttgccgcattaggcttgggctgtgctggtggggaagcaatttccaccatggtggaagcattcagggaacggcgagatttcttggttaagagctttggggaattggaaggtgttaagatatcagaacctcagggagctttccatctattcattgatttcagctcctactacggaatagaagctgaaggttttggcaaaatcgaaaattcggagtcactttgtcgatacttcctggacaaggctcaggttgcactagtccctggagatgcatttggggatgatagctgcattcggatatcatatgcagcatccctcaccaccttacaagctgcttttgagagaattaagaaagcactcatctccctcaggcctgctgttcctgtttaacacatgaattatatatcatttagcatgtttaattgttggttgtattttgttttgggatttgaattttttatgttttaataagctttttttttaataaactctggattttctctgttctcttc

SEQ ID NO: 152 - protein, 479 aa, Gossypium hirsutum
MAVSLHNSTGISGVGFDSKFLGSHSASKASVSVSFHSSITNLSLKSVETSKQQSYRITAMSKTESSSDQVKLDISLSPRVNSVKPSKTVAITDHATALAQAGVPVIRLAAGEPDFDTPAIIAETGINAIREGYTRYTPNAGTLELRTAICHKLKEENGISYSHDQIVVSNGAKQSIPQAVLAVCSPGDEVIIPAPYWVKYPEMARLADATPTILPTLICDNFLLDPEVLESKISAKSRLLILCSPSNPTGSVYPKKLLEKIAEIVAKHPRLLVLSDEIYEHIIYAPATHTSFASLPGMWERTLTVNGFSKAFAMTGWRLGYIAGPKHFVAACNKIQSQSTSGASSIAQKAGVAALGLGCAGGEAISTMVEAFRERRDFLVKSFGELEGVKISEPQGAFHLFIDFSSYYGIEAEGFGKIENSESLCRYFLDKAQVALVPGDAFGDDSCIRISYAASLTTLQAAFERIKKALISLRPAVPV

SEQ ID NO: 153 - DNA, 1692 bp, Glycine max
gggttcagttttcatatggccaacacactatataacggcgccacatgccgaatccctctccggaaccaatccctggccttctctcgccacgtttgcagatccctctctttcctccctatgtgagttctctcctctcttcttccctgcaatttcacttcacacaccaattgctctctctcacccttcgcagaacacgtgcggcaaaacaacccaacgcaattgcggttaaggcttcttcgcactctgacttcgacgttgacctttcgctcagtcctcgtgtcaatgccgtcaagccttccaaaaccgtcgccatcagcgaccacgccaccgctctcgtccaagccggcgttcccgtcatccgcctcgccgccggcgagcccgatttcgacacgcccgctcccatagccgaggctgggattaatgcaattcgtgaaggttacacgaggtacacgcccaatgccggaaccatggaactgcgccaagcgatttgtcacaagctaaaagaagagaatgggattacttatactcctgaccaagttgtggttagtaacggagccaaacagagtattgctcaggcagtgcttgcagtttcctcccctggagatgaggttattattccagctccattctgggttagttacccagaaatggcaaggttggctgatgcaacacctgtgattcttccaaccttaatatctgataatttccttttggatcccaaactcctcgaatccaaaattactgaaagatcaagactgcttattctttgttctccatctaacccaacgggatctgtctaccccaaagaattacttgaagagatagcccgaattgttgcaaagcaccccaggcttctggttctctctgatgaaatttacgaacacataatttatgcaccagcaactcacacaagctttgcatctttaccaggaatgtgggacagaactcttactgtgaatggattttctaaggcctttgcaatgactggttggcggcttggatatattgctggtccaaaacattttgttgcagcatgtggaaagatccaaagtcagttcacttcaggggccagtagtatagctcagaaagctgcagttgctgcattaggactaggccatgctggtggggaggcagtttctaccatggtgaaagcatttagggagcgaagggatttcttggtacaaagttttagagaaatagatggtgtcaagatatctgaaccccagggagcattttatctattccttgatttcagcttctattatggaagagaagctgaaggattcggtaaaattgaggattctgagtccctctgtcgatatctactggatgtgggccaggtagccctggtgccagggagtgcatttggagatgacacttgcatccgcatctcttatgcagaatcccttactaccctacaggcagctgtagaaagagttaagagagcacttatcccgctgagctctgctgcacttgtttaatattgctgttttgttgtaatgggtgtattttatttttattttaattttggcaatgtgtaatctgtttattctgaaaatattaggctttggatattcttccataaaatgaagtgatacaactgtctttaatggtttaaaaaaaaaaaaaaaaaaaactcgaggttttttttttttttttttttttttttttttttttttttttttttgggga

SEQ ID NO: 154 - protein, 478 aa, Glycine max
MPNPSPEPIPGLLSPRLQIPLFPPYVSSLLSSSLQFHFTHQLLSLTLRRTRAAKQPNAIAVKASSHSDFDVDLSLSPRVNAVKPSKTVAISDHATALVQAGVPVIRLAAGEPDFDTPAPIAEAGINAIREGYTRYTPNAGTMELRQAICHKLKEENGITYTPDQVVVSNGAKQSIAQAVLAVSSPGDEVIIPAPFWVSYPEMARLADATPVILPTLISDNFLLDPKLLESKITERSRLLILCSPSNPTGSVYPKELLEEIARIVAKHPRLLVLSDEIYEHIIYAPATHTSFASLPGMWDRTLTVNGFSKAFAMTGWRLGYIAGPKHFVAACGKIQSQFTSGASSIAQKAAVAALGLGHAGGEAVSTMVKAFRERRDFLVQSFREIDGVKISEPQGAFYLFLDFSFYYGREAEGFGKIEDSESLCRYLLDVGQVALVPGSAFGDDTCIRISYAESLTTLQAAVERVKRALIPLSSAALV

SEQ ID NO: 155 - DNA, 1632 bp, Hordeum vulgare
ctccaatggccttctcacccgtctccaccccttcctcctcctcctcctccccgtccttcaccctccccaccaaaccctccacgggcacaggctccgtctccttctccagggcgtcgcgggagaggcggcagccctcgaggaagtccaggatggcggcggtgagggcggaggcggtggacacgtccatcagcccgcgggtcagcgcgctgcggccgtccaagaccatggccatcaccgaccaggccagcgcgctgcggcaggccggggtgcccgtcattggactcgccgctggggagcccgacttcgacacgccggcggcgatcgccgaggctgggatgaatgcaatcagggatggctttacaaggtacacacctaatgccgggactatggagctgaggaaagccatctgcaacaagcttcaggaggagaatggtctaacatacagcccagatcaggtgctagtgagcaatggagctaagcagtgcattacacaagctgttcttgctgtttgctcacctggtgatgaggttttgataccagcgccattctgggtcagctatcctgaaatggctaggttggctggtgcaacaccagtgatcctcccgacaagcatatcagacagtttcctgctaaagccagaatcgcttgcctctgtgatcactgaaaaatcaaggctcttgattctatgctctccatctaatccaacgggctctgtgtatcctagggagctgcttgaggagattgctgctatagtcaagaagtatcctaggctcctggttctttctgatgagatctatgagcatattatctatcatcctgctaagcacacaagctttgccgcattacctggaatgtatgacagaacactaactgtaaatgggttttctaaggcttttgctatgactggttggcgacttgggtatttagctgcccctaaacattttgtctcagcctgtggaaagatccaaagccagtacacatctggtgccagtagtatatcgcagaaggcagggcttgcagccttgaacctaggttatgccggcggtgaagcagtttcgaccatggtcaaagcattccaggagcgccgggactaccttgtaagaagtttcagggaactgccaggagtcaaaatatcagaacctcagggtgccttttatttgttcatcgacttcagctcctactatggatccgaggtagagggttttggcactatcaaggactctgagaccctctgcatgttcctgctagagaaagcacaggttgcgcttgtccctggggatgcatttggagatgacacgggtgttcgtatctcatatgccgctgcactatcaacactacaatctgcaatggagaagataaaagacgcaatgactctgctcaaggcccctgccgcggttcaatgaaaacagcgtgctgaaggcattttcaccagcaatgctgcaccgtcatattaaaagcatgtccatcgggagaatatgaaaacatgccattgttgtgcaacagttagttcaccttttttgtttggttgcaaacttgcgaaggatttgttttgttccaatcttttcatttggtgtaatgtaattgtctttacctgcaagtcagaaatgaaaataatatgttgttttgacagcc

SEQ ID NO: 156 - protein, 465 aa, Hordeum vulgare
MAFSPVSTPSSSSSSPSFTLPTKPSTGTGSVSFSRASRERRQPSRKSRMAAVRAEAVDTSISPRVSALRPSKTMAITDQASALRQAGVPVIGLAAGEPDFDTPAAIAEAGMNAIRDGFTRYTPNAGTMELRKAICNKLQEENGLTYSPDQVLVSNGAKQCITQAVLAVCSPGDEVLIPAPFWVSYPEMARLAGATPVILPTSISDSFLLKPESLASVITEKSRLLILCSPSNPTGSVYPRELLEEIAAIVKKYPRLLVLSDEIYEHIIYHPAKHTSFAALPGMYDRTLTVNGFSKAFAMTGWRLGYLAAPKHFVSACGKIQSQYTSGASSISQKAGLAALNLGYAGGEAVSTMVKAFQERRDYLVRSFRELPGVKISEPQGAFYLFIDFSSYYGSEVEGFGTIKDSETLCMFLLEKAQVALVPGDAFGDDTGVRISYAAALSTLQSAMEKIKDAMTLLKAPAAVQ

SEQ ID NO: 157 - DNA, 1814 bp, Malus domestica
cacgagccaacccaattggaggagcaatccaactccaacaccactacctgctccacccacccccatggccgccttttccctccagacatcgacctccagcattgcccttcccagtttcgaaatccgaatccccggatccgatttgggttcaaacccaaaatccatatgtttcacttgtcagcctcgtttgcttcctctcacgcgtcggagcaacagtaagagtagatcaagaggaggagttgtgatggcggtggcagtgactggcaatgaccagtcccaagtggaagtcgacgtctctctgagcccacgagtcaactccgtcaagccttcgaagacagtcgccattactgaccaggccacggctctcgtgcaagccggagtgcccgtcattcgattagctgctggcgaacctgatttcgataccccttccatcgtagctgaggcgggtatcaatgcgattcgcgaaggcttcaccaggtacacaccaaatgcagggactttggagctgcgccaagcaatttgtcataagctcaaagaggagaatgggatcacttacacaccggatcagatcgtagttagcaatggagccaagcagagcattgttcaagctgtgcttgcagtttgttccccaggggatgaggttatgattccagctccattttgggtgagttaccctgaaatggcaaggatggccgatgcaactcctgtgattcttccaacgagcatctccaatgattttctcttagatcctaaacttctcgaatccaaactcactgagaagtcaagactgctgattctttgttctccatccaaccccacagggtctgtctaccccaagaatttgcttcaagagattgctaagattgtagcaaagcatcccaggcttctggttatttctgatgaaatatatgaacacataatttacgcaccggcaactcacacaagctttgcatccttgccaggcatgtgggagaggactctgacaatcaatgggttttccaaggcttttgcaatgactggttggcgacttggatatattgccgggcctaaacactttgttacggcatgtggaaagctccagagtcagttcacctcaggtgccagtagtatatcacagaaagcaggagttgctgccttaggtctcggttatgctggtggagaggcagttactactatggttaaagcgttcagggagcgacgggatttcttggtcaaaagctttggcaaactttcaggtgtcaggatttcagaacccaggggagctttctatctcttcatagatttcagcgcttactatggaacggaggctgaaggatttggtaaaattgagaattcagagtccttatgccgttacctacttgacaagggccaggttgcactagtaccaggagatgcgtttggagatgatacgtgcatacgaatctcctatgcagcatcccttcccaccctacaggcagctgtggagagaattaagaaagcacttgttgaactaaagccctcagttggtgtttaacgaaaactaaaatgtttccggtattgccactgttctacttgttgtaactctgtattctagtatctgtttcgaagttatgcataagttggtcacgtcggggacgtctaaaataattctttcggagttgtatttgatagtaatgtaaacacaggcgtgtttgtttcgttgaatcggatttcaagaattcgaaactcattttttgactgggtttttcttactggaaaaactaatgaaatccgacattttcagcggaatatctggaaatattggaaataaaatggccacggtttgagaaaaaaaa

SEQ ID NO: 158 - protein, 482 aa, Malus domestica
MAAFSLQTSTSSIALPSFEIRIPGSDLGSNPKSICFTCQPRLLPLTRRSNSKSRSRGGVVMAVAVTGNDQSQVEVDVSLSPRVNSVKPSKTVAITDQATALVQAGVPVIRLAAGEPDFDTPSIVAEAGINAIREGFTRYTPNAGTLELRQAICHKLKEENGITYTPDQIVVSNGAKQSIVQAVLAVCSPGDEVMIPAPFWVSYPEMARMADATPVILPTSISNDFLLDPKLLESKLTEKSRLLILCSPSNPTGSVYPKNLLQEIAKIVAKHPRLLVISDEIYEHIIYAPATHTSFASLPGMWERTLTINGFSKAFAMTGWRLGYIAGPKHFVTACGKLQSQFTSGASSISQKAGVAALGLGYAGGEAVTTMVKAFRERRDFLVKSFGKLSGVRISEPRGAFYLFIDFSAYYGTEAEGFGKIENSESLCRYLLDKGQVALVPGDAFGDDTCIRISYAASLPTLQAAVERIKKALVELKPSVGV

SEQ ID NO: 159 - DNA, 1632 bp, Nicotiana tabacum
ccgcatcttcgtcaagaattgcttcaagaccctccattcctcctggacttcattctgattcattcaatcccgcttcaatctctttctcttctaaccttcacagcctttctctcaaatcttcaggctcaaagagacagctatactcacctagaacaggtgcagttgtcataacacagagcatggacagagttgaggttgatatctcgctcagccctagggtaaattcagtaaagccttcaaaaacagttgctataaccgaccaggcaactgctcttgcgcaagctggtgtacctgttattcgattagcagctggtgaacctgattttgacactccagttcctatagcagaggctgggataaatgcaattcgcgaaggtcataccaggtatacaccaaatgcaggtactatggaacttcgttcagcgatttgtcataagttaaaagaggagaatgggctatcatacacgcctgatcagattttggtaagcaatggggcaaaacaaagtattgtacaggcagtgcttgcagtttgttccccaggagatgaggttcttattccagctcccttttgggtgagttaccctgaaatggcaaggatggcagatgcaacgcctgtgattcttccaaccagcatatctgaagattttctcttacatccaaagcttcttgaatctaaacttagcgagaagtcaagacttctgattctttgttctccatccaacccaacagggtctgtttaccctcggaaattgcttgaagagattgctgagattgttgctaggcatccgaggcttcttgtgatatcagatgaaatttacgaacacattatttatgcaccagcaactcataccagctttgcatctttgcctggtatgtgggatcggactctcaccgtaaatggtttctctaaggcatttgcgatgactggttggagacttggttatatagctggtcctaaacactttgtttctgcatgcaataagatccagagccagttcacatcaggtgccagtagcatctcccaaaaagcagctgtggctgctctgggactgggctatgctggtggagaagcagttgcaactatggtaaaagcattccgtaagcggcgagattaccttgtcaagagctttggggaaatagatggtgtcaaaatttcagagcctcggggggctttctatctatttattgatttaagctcttattatggagcagaggttgatggatttggctccatcaacaactcagaatctctttgccgatatttgctggataaagctcaagtagcgcttgtcccgggggatgcattcggggatgacacatgtatccgtatctcctatgcagcatcgctctcaaccttgcaggcagctgtggagagaatcaacaaagcattggttactcttaaacctactgtcccagtttagaacatgcatcaattactgcatgctaatttgaatgcaccaacagacaaaaggttgtatactagtttgtagtctgtccttccctgttctgttttcatgtattcttaagtgcattactggcgattatttctcctggatctttgagaaagttcctatactctgaagttgttgatttgtgtgcaaattcttggttgatgattaaaaatgcaaataa

SEQ ID NO: 160 - protein, 413 aa, Nicotiana tabacum
MDRVEVDISLSPRVNSVKPSKTVAITDQATALAQAGVPVIRLAAGEPDFDTPVPIAEAGINAIREGHTRYTPNAGTMELRSAICHKLKEENGLSYTPDQILVSNGAKQSIVQAVLAVCSPGDEVLIPAPFWVSYPEMARMADATPVILPTSISEDFLLHPKLLESKLSEKSRLLILCSPSNPTGSVYPRKLLEEIAEIVARHPRLLVISDEIYEHIIYAPATHTSFASLPGMWDRTLTVNGFSKAFAMTGWRLGYIAGPKHFVSACNKIQSQFTSGASSISQKAAVAALGLGYAGGEAVATMVKAFRKRRDYLVKSFGEIDGVKISEPRGAFYLFIDLSSYYGAEVDGFGSINNSESLCRYLLDKAQVALVPGDAFGDDTCIRISYAASLSTLQAAVERINKALVTLKPTVPV

SEQ ID NO: 161 - DNA, 1647 bp, Ocimum basilicum
attaagattttatcaagatggcggctgctccctcttatttcattcaccccacatcaacaactgggagccaccttcacccaaaatctcaggcagatgtttcgctgaattctaaatcactctctttctcctcccaattccacaccttctccttcaaatcattacgtgcaacaggacaactgtatccggagggagttagtgcaatggtgaaagcggagatgaagtcagagacgacgcaggttgatatcagtctgagccccagagtaaactcagtgaagccatcaaagacggtggctatcacagaccaggcaactgcacttgctcaagcaggtgttcctgttattcggctagcagctggagaacctgattttgatactccagctccaattgctgaggctggtattaatgcaattcgtgaagggttcactcggtatactcccaatgcgggcacattggaactccgtactgctatttgtcacaagctaaaagaggagaatggattatcctacacacctgaccagattttggtgagtaatggtgcgaaacagagtattgttcaggcagttcttgcagtgtgttctcctggagacgaggtgattattccatctccattttgggtgagctacccagaaatggcaaggttggctgatgctacccctgtaattcttccaacgagcatatctgaaaactttcttttagatccaaaggttcttgaatccacactgagtgagaagtcgaggctgttgattctttgctctccttccaacccaacagggtctgtttacccccgtaaattgctcgaacagattgctgaaattgtagccaagcatcccaggcttctggttctgtccgatgaaatttatgagcatatcatttatgctccagcaactcatacaagctttgcatctttgccaggcatgtgggatagaaccttgactgtcaacggcttctcaaaggccttcgccatgactggttggagactagggtatcttgctggtccaaagcactttgttgctgcatgtgggaagatccaaagtcagactacttcgggtgcgagcagcatatctcaaaaagctgcggttgctgctttaggaatgggatatgcaggcggcgaagcagttgcagttatggttaaagcattccgtgagaggagagatttcctggtcaagagctttggagaattagacggtgtcaaaatctcagagcctcagggagctttttatcttttcctggatttcagttcttactatggatcaaaggttgatggattcggtgtgatcaatgactcagagtccctgtgccggtatttgcttgataaggctcaagttgccctggttccaggagatgcatttggagacgacacgtgcattcgcatatcatatgctgagtcgctgaccacactacaggcggccgtagacagaatcaaggaagctttacttgccctcaaggcagcacccatccctgtctagttgttgaatttgttccaagtttttaactctacacctctctcgtttctgttttctaccaatttctatttgcatttagagtagtcaatactaggttgttgaattttgaatgctcaaattcttgttcttctagtgtaatttgtcaaaatttccattgttaaatataattttcaagttactcgag

SEQ ID NO: 162 - protein, 482 aa, Ocimum basilicum
MAAAPSYFIHPTSTTGSHLHPKSQADVSLNSKSLSFSSQFHTFSFKSLRATGQLYPEGVSAMVKAEMKSETTQVDISLSPRVNSVKPSKTVAITDQATALAQAGVPVIRLAAGEPDFDTPAPIAEAGINAIREGFTRYTPNAGTLELRTAICHKLKEENGLSYTPDQILVSNGAKQSIVQAVLAVCSPGDEVIIPSPFWVSYPEMARLADATPVILPTSISENFLLDPKVLESTLSEKSRLLILCSPSNPTGSVYPRKLLEQIAEIVAKHPRLLVLSDEIYEHIIYAPATHTSFASLPGMWDRTLTVNGFSKAFAMTGWRLGYLAGPKHFVAACGKIQSQTTSGASSISQKAAVAALGMGYAGGEAVAVMVKAFRERRDFLVKSFGELDGVKISEPQGAFYLFLDFSSYYGSKVDGFGVINDSESLCRYLLDKAQVALVPGDAFGDDTCIRISYAESLTTLQAAVDRIKEALLALKAAPIPV

SEQ ID NO: 163 - DNA, 1638 bp, Oryza sativa
acaacaacacaaactacctaccgctgcgacacacgcagccgagctaagcgctaccaccctcccatccatggcggcctccacctccgccacctccttctccactcccaccaagcccgcctcctcctcctcctcctcctcaagtcccaactccgtctgcttcgccagggcgtcggggaggtgcaggatggcgtcggtggtggtgagggcggaggcggtggacgcgaccatcagcccgacggtgagcgcgctgcggccgtccaagaccatggccatcaccgaccaggccacggcgctgcggcaggctggcgtcccggtcatcggcctcgccgccggggagcccgacttcgacacgccgcacgtgattgctgaggctgggatgaatgcaattaaggatggttatacaaggtacactcctaatgctgggactttggagctgagaaaggctatctgcaataaactccaagaggaaaatgggatatcctacagtccagatcaggtgctggtgagcaatggagctaagcaatgcattacgcaagccgtacttgccgtttgctcacctggtgatgaggttttgataccagcaccatactgggtcagttatcctgagatggctacattggctggtgcaactccagtgatccttcctacaagcatatcagagaatttcttgctaaggccagagctgcttgcttcaaagatcaacgagaaatcgaggcttttgattctctgctctccttctaatccaactggatcagtatatccaaaggagctgcttgaagaaatagctgacatagtcaagaagtatcctaggcttcttgttttgtctgatgagatttatgagcatatcatctatcagccagcaaaacacacaagctttgcttcattgcctggaatgtgggatagaacattaactgtaaatggtttttctaaggcttttgcaatgacgggctggcgacttggataccttgcagccccaaaacattttgttgcagcctgtggaaagatccaaagccagtttacttcaggtgctagtagcatatcacagaaggcagggctcgctgctttgaaccttggctacgctggtggtgaagcagtctcaactatggtcaaagcattccaggaacgtcgtgattaccttgtaaaaagtttcaaggaactgccaggtgtgaagatatcagagcctcagggtgccttttatttgttcatcgacttcagctcctactatggatctgaagtagagggttttggcactatcaaggactctgagtccctctgcatgttcctcttggagaaagcacaggttgcacttgtcccgggcgatgcatttggggacgacaaatgcatccgcatgtcatatgctgcagcactatctacgcttcaaactgctatggagaaaatcaaagaagctgttgcgctgatcaaaccccgtgttgctgctaagtgaaaatgtgaggttatacaatggcagtggggagtgaccaaaggcgccttcaactgccacttcggtaccatttgaaatacaaacgatgtgtcattgtctgacaagtaagaatttttgttgtttgattgtgtctgctgtgataaagaacttgaatgtaactccgggaaaatggataatacttcttgatttctttttct

SEQ ID NO: 164 - protein, 458 aa, Oryza sativa
MAASTSATSFSTPTKPASSSSSSSSPNSVCFARASGRCRMASVVVRAEAVDATISPTVSALRPSKTMAITDQATALRQAGVPVIGLAAGEPDFDTPHVIAEAGMNAIKDGYTRYTPNAGTLELRKAICNKLQEENGISYSPDQVLVSNGAKQCITQAVLAVCSPGDEVLIPAPYWVSYPEMATLAGATPVILPTSISENFLLRPELLASKINEKSRLLILCSPSNPTGSVYPKELLEEIADIVKKYPRLLVLSDEIYEHIIYQPAKHTSFASLPGMWDRTLTVNGFSKAFAMTGWRLGYLAAPKHFVAACGKIQSQFTSGASSISQKAGLAALNLGYAGGEAVSTMVKAFQERRDYLVKSFKELPGVKISEPQGAFYLFIDFSSYYGSEVEGFGTIKDSESLCMFLLEKAQVALVPGDAFGDDKCIRMSYAAALSTLQTAMEKIKEAVALIKPRVAAK

SEQ ID NO: 165 - DNA, 1284 bp, Physcomitrella patens
atgactgtgtgtgcaactagtaacggtgtgaatggaggttcaactccagtcgatactaccataagcccccgggtagcagccttaaaaccatcgaagactatggccattgcagatgcagccactgctctggtggagtccggtgttcctgttataagactggcagccggggagccagacttcgacaccccgaaggcaatagtagaggccggaacaaaagcaattcaagagggcttcactaggtacactccaaatgcaggcactctagagttacgaaaagctatttgtcacaaattgcaagaggaaaatgggttgtcctacaaacctgatgagattctagttagtaatggcgccaagcaaagcattatgcaagctgtactcgccgtatgttcccctggtgatgaggttattgtgccagctcctttctgggtcagctaccctgagatggcacgtttggcagacgcaacgcccgtcattgttcaaactaaggtgtcggaaaatttcatattgaagccagaagcactgtctgctgtattgactgagaaatccagagttttgatcttatgttctccatcaaatccgacaggctcagtatatacccttgaagatctgcaggcaattgctgcaattgttgcaaaacatccgcgtttgctggtgatctctgatgaaatctacgagcacatcatgtacactccagcaacgcatcatagctttgcagcattgccgggaatgtgggaacgtactcttacagttaatggtttctctaagtgttttgcgatgactggttggcgattgggatatttagcagctccgaaacactttttggtggcttgcaacagaattcagagtcagtcaacttctggagcaagcagcatttctcaaaaggctggagtagcagcattggccctgggcaaagcaggaggcgaagatgtagtgacaatggtgaaagctttcagagagcgaagggactttctggtacaacgtctgcaagctatggatggtgttgtacttgccgttcctcagggagccttctacttgtttccagatttcagtgcttactttgggagtcacgctgatggatttgggtttatttctgatgctgaaactctatgccgtttctttctagaaaaagccaaggtagctctagtcccaggagacgcttttggcaacggtggatgcatccgaatatcatatgcagcgtccatggaagaactgaaaacggccattgagagtattgagtctgttatggctctgcttaaacctgcatcagctgcctcccttgcttag

SEQ ID NO: 166 - protein, 427 aa, Physcomitrella patens
MTVCATSNGVNGGSTPVDTTISPRVAALKPSKTMAIADAATALVESGVPVIRLAAGEPDFDTPKAIVEAGTKAIQEGFTRYTPNAGTLELRKAICHKLQEENGLSYKPDEILVSNGAKQSIMQAVLAVCSPGDEVIVPAPFWVSYPEMARLADATPVIVQTKVSENFILKPEALSAVLTEKSRVLILCSPSNPTGSVYTLEDLQAIAAIVAKHPRLLVISDEIYEHIMYTPATHHSFAALPGMWERTLTVNGFSKCFAMTGWRLGYLAAPKHFLVACNRIQSQSTSGASSISQKAGVAALALGKAGGEDVVTMVKAFRERRDFLVQRLQAMDGVVLAVPQGAFYLFPDFSAYFGSHADGFGFISDAETLCRFFLEKAKVALVPGDAFGNGGCIRISYAASMEELKTAIESIESVMALLKPASAASLA

SEQ ID NO: 167 - DNA, 1976 bp, Pinus pinaster
acatgtttggctctccatccgtggcatatacagtgcctcaattaaaattggcaccgcactgaaattctgagaatatttggttacggaaggaaagaggtcaccagaagagggatttagttacatttggcacactaactacgaaatgatgtctgcaagctttaagtgcccagtatcattgtcaggtgtggaaaatatatgtaacggggacaaggctattcccgggatcaactcgaggactttgttcacagggagttcattcttacaacgacatcatagtgccaacaagatctttttcaggacgtgtggaaaaaaggggagctgttgcttgttcaacataagagccatggctgagacggacagtggaaatggtgtaccacaacttgatatctcactgagtccaagggtggcagcccttaaaccatcaaagacaatggccataacagaccttgcaactgcacttaagcaagctggagttcctgttatcggattagcagctggtgaacctgattttaatacaccagatgcagtagctgaggcaggcattaaggcaattcaggatggctatactcgatatacacctaatgcaggaactatggagattagaactgctatttgtcataagttaaaagaggaaaatggcctctcatatacacctgaccagatattggttagtaacggagcaaaacaatgcatcatggcagcagctgttttagcagtttgttcaccgggtgatgaggttattattccagctccattttgggtaagctatactgaaatggctcggttagcagatgcaactccagtgataattccaactttattatcagatgattttctattgaatccagaagtattttcttcaaagctgaatgaaaattcaaggttattgattctttgttcaccttccaacccaactggatctgtttatccaagagaattgctagaagaaatagcaaaaattgttgcaaagcatcctaagttactggttctgtcagatgaaatctacgaacacattatgtatccaccagcaaagcacacgagctttgcttctttgccaggaatgtgggaaagaacactgactgttaatggattctctaaggcctttgcaatgacaggttggcgacttgggtacttggcaggaccaaagcactttgttacagcttgtggaagaattcagagccagtccacatcaggtgctagcagtatctctcagaaagcaggggttgctgctttggccttgggatatgctggtagtgaagcagtgtctactatggtcaaagcatacagggagaggagagacttcttagtccaaagattgcaagccatggagggtgttaaattaccagtgcctcagggtgctttttatttatttcccgattttagttcctactatggaactgaagtggaagattttggtgttatcaatggctcagaagctctctgtcgtttcttcctagagaaggcacaagttgctcttgtcccaggagatgccttcggcaatgatgactgcattcgtatttcatatgctgcatcccttgacacgcttagaacagccataaacaatatagagaagtccttgttgcttctgcgccctgctgctgcagcatctaaggcaagctaactactgagtaatatttagtgattctgaagagcaataatgtttcacatggaattatattctcaccatatatcttgaaatggcctgaaaggtggccagactatataaagaacactggaaaaaatgttcaagtttaggtagaactttagaagttgagttgaatgtgtcaaccatctctaggtgttgaaaatttgctattgctgttatatgtgttcattttaccaatgttcgtagtaaaagtcagtttcttgtttccagtcaggacttgggattgctgagctcctgtttgaggtgatcgtgtaggcaaatctatttatgtcacttttattgtaagataaaaattgttgattgctatgac

SEQ ID NO: 168 - protein, 492 aa, Pinus pinaster
MMSASFKCPVSLSGVENICNGDKAIPGINSRTLFTGSSFLQRHHSANKIFFRTCGKKGSCCLFNIRAMAETDSGNGVPQLDISLSPRVAALKPSKTMAITDLATALKQAGVPVIGLAAGEPDFNTPDAVAEAGIKAIQDGYTRYTPNAGTMEIRTAICHKLKEENGLSYTPDQILVSNGAKQCIMAAAVLAVCSPGDEVIIPAPFWVSYTEMARLADATPVIIPTLLSDDFLLNPEVFSSKLNENSRLLILCSPSNPTGSVYPRELLEEIAKIVAKHPKLLVLSDEIYEHIMYPPAKHTSFASLPGMWERTLTVNGFSKAFAMTGWRLGYLAGPKHFVTACGRIQSQSTSGASSISQKAGVAALALGYAGSEAVSTMVKAYRERRDFLVQRLQAMEGVKLPVPQGAFYLFPDFSSYYGTEVEDFGVINGSEALCRFFLEKAQVALVPGDAFGNDDCIRISYAASLDTLRTAINNIEKSLLLLRPAAAASKAS

SEQ ID NO: 169 - DNA, 1553 bp, Populus trichocarpa
gccaactaaaacgccaaccttccgtcacccatggctgcttcaacttcaagcatttcccgtcttggttttagacaccaccaacctctcggaaccaatccgggttcccactctcaaccctccggatctgtctctttcctttctgggtctcactgtttctacttcaaaccattggaggctactagacaatcacagttgtctagagtaagtgtagtggtgaaggcagaaagtaggtctgaggagatgcaagtcgatatttctttgagtccaagggtgactgctgtaaaaccttcaaagactgtggccataactgaccaggcgactgcgcttgcacaagctggagtccctgttattcgcctggctgctggagagcctgattttgatactccagctgtaatagcagaggctggtataaatgctattcgtgaaggtcacacaaggtacactccaaatgctggtacacaggagcttcgagttgcaatttgtcagaagttgaaggaggagaatggtatatcttataaacctgaccaaattttagtaagcaatggggccaagcagagtatatatcaagcgatacttgcagtttgctctcctggcgatgaggttataattccagcaccattttgggtgagttatccagaaatggcaaggctggctgatgcaaccccggtgattcttccaacatcaatctctgagaattttctcttggacccaaagcaacttgaatcaaaactgaatgaaaagtcaaggctgctgattctttgctctccatctaacccaacaggatcagtttatcctaagaaattgcttgaagagattgcaaaaattgtagcaaaacatcctaggcttctggtcttgtctgatgagatatatgaacacataatatatgcacctgctactcacacaagctttgcatctttgcccggcatgtgggaaaggactttgacagtgaatggattttctaaggcctttgcaatgactggttggagacttgggtaccttgccggccctaagcactttgttgctgcatgtaataagatacagagccagtttacctcaggtgccagcagcatatcgcaaaaggcaggagttgcagcattaggactaggctatgctggtggggaagcagtgtccaccatggtgacagcattcagggagcggagagatttcttgattaaaagctttggagaaatggaaggtgttgggttgtcggaacctctgggagcattttatcttttcattgatttcagctcgtactatggagcagaggttgaagggtttggtaaaattgacgactctgacgccctttgccgttacctgcttgatcaggcccaggttgcattagttccaggggttgcatttggagatgacagctgcatacgtatatcctatgcagcttctctgaccaccctacaggcagctgtagagagaattaagaaagcgcttctcccactcaagtctgccgtccctgtgtaatgtagatgaattgcaattgttgtactcttttagagattaaaaaaaggggcacttcattattgattgttacaaataaaatg

SEQ ID NO: 170 - protein, 480 aa, Populus trichocarpa
MAASTSSISRLGFRHHQPLGTNPGSHSQPSGSVSFLSGSHCFYFKPLEATRQSQLSRVSVVVKAESRSEEMQVDISLSPRVTAVKPSKTVAITDQATALAQAGVPVIRLAAGEPDFDTPAVIAEAGINAIREGHTRYTPNAGTQELRVAICQKLKEENGISYKPDQILVSNGAKQSIYQAILAVCSPGDEVIIPAPFWVSYPEMARLADATPVILPTSISENFLLDPKQLESKLNEKSRLLILCSPSNPTGSVYPKKLLEEIAKIVAKHPRLLVLSDEIYEHIIYAPATHTSFASLPGMWERTLTVNGFSKAFAMTGWRLGYLAGPKHFVAACNKIQSQFTSGASSISQKAGVAALGLGYAGGEAVSTMVTAFRERRDFLIKSFGEMEGVGLSEPLGAFYLFIDFSSYYGAEVEGFGKIDDSDALCRYLLDQAQVALVPGVAFGDDSCIRISYAASLTTLQAAVERIKKALLPLKSAVPV

SEQ ID NO: 171 - DNA, 1586 bp, Populus trichocarpa
actactaaacgcctccttgaatattcactcatggcagctacttcaacttcaaccagttatcgtcttggtttccgactccaccaacaactcgcaccctgttcaggttctcaccctcaaacctccggagccgtgtcctttctttcagggtctcacaatttctccttcaaatcgttggagactactagacgatcacagttgtctagaataagtgtagttgtgaaggcagaaagtaggtctgaagagatgcaactcgatatttctttgagtccaagggtgaatgctgtaaaaccttcaaagacagtggccataacggaccaggctactgcgcttgtacaagctggggttcctgttattcgtttggctgctggagagcctgattttgatacaccggttgtaatagcagaggctggaataaatgcaattcgcgaaggtttcacaaggtatactccaaatgctggtacacaggagcttcgagttgcaatttgtcataagctgaaggaggagaacggtatctcttatacacctgaccaaattttagttagcaatggtgccaagcagagtatatatcaagcaatgcttgcagtttgctctcctggcgatgaggttattattcctgcaccattttgggtgagttacccagaaatggcgaggctggctgatgcaaccccagtgattcttccaacatcaatctctgaaaactttctcttggatccaaagctacttgaatcaaaactgagtgcaaagtcaaggctgttgattctttgttctccatctaacccaacaggatcagtttattccaagaaattgcttgaagagattgcacggattgtagcgaaacatcctaggcttttggtcttgtctgatgagatatacgaacacataatatatgcacctgctactcacataagctttgcatctttgcccggcatgtgggaaaggactttgacagtgaacggattttctaagattaacatttggaaagcgggaaatttgcaggcctttgcaatgactggttggagactggggtatattgctggtcccaagcactttgttgcagcgtgtaataagatacagagtcagtttacatcaggtgccagcagtatatctcaaaaggcaggcgttgctgcactaggactcggctatgctggtggggaagcagtttctaccatggtgaaagcattcatggagcggagagatttcttgattagaagctttggagaaatggaaggtgttaggatgtcagaacctcagggagcattttatcttttcattgataccagctcgtactatggaacagaggctgaaggttttggtaaaatcgaggactctgactccctttgccgttacctgttggatcaagcccaggttgctctagtcccaggggttgcatttggagatgacagctgcatacgtatctcatatgcagcatctctgaccaccttacaggaggctgtagggagaattaagaaggctctactcccactcaagtctgctgtccctgtttaatgtgaagaatgttaaattgcaattgtactctttcagggtttaaaaatgtgtactactttattgattgttacaaataaaac

SEQ ID NO: 172 - protein, 491 aa, Populus trichocarpa
MAATSTSTSYRLGFRLHQQLAPCSGSHPQTSGAVSFLSGSHNFSFKSLETTRRSQLSRISVVVKAESRSEEMQLDISLSPRVNAVKPSKTVAITDQATALVQAGVPVIRLAAGEPDFDTPVVIAEAGINAIREGFTRYTPNAGTQELRVAICHKLKEENGISYTPDQILVSNGAKQSIYQAMLAVCSPGDEVIIPAPFWVSYPEMARLADATPVILPTSISENFLLDPKLLESKLSAKSRLLILCSPSNPTGSVYSKKLLEEIARIVAKHPRLLVLSDEIYEHIIYAPATHISFASLPGMWERTLTVNGFSKINIWKAGNLQAFAMTGWRLGYIAGPKHFVAACNKIQSQFTSGASSISQKAGVAALGLGYAGGEAVSTMVKAFMERRDFLIRSFGEMEGVRMSEPQGAFYLFIDTSSYYGTEAEGFGKIEDSDSLCRYLLDQAQVALVPGVAFGDDSCIRISYAASLTTLQEAVGRIKKALLPLKSAVPV

SEQ ID NO: 173 - DNA, 1847 bp, Solanum lycopersicum
gatagaatgaaagaaaaaagacaactacttcaccaaccaaagaggaaagcagcctccaacaacaattaggcttctttcttctaatcttaccaaccctcttctgtttcactcactatatataaaaacatatttattccatcgcccaaatgaagtttcatcgtccacttgaaaacccaactttgaaattgcttatagaacccaccaaatgactgctgcttcatcttcttctctattgggttcatcaagaattggttcaggacctaccatttctggacttcattcagattcactcaaccccacatcaatctccttctcttctaacctacaaggtctctctctaagatcttcaggggcaaagagacagctatactcacgtggaacaggttcagttgtcatagcacagaacatggacagagttgaggttgatctctctctcagccccagggtaaattcagtaaagccttcaaaaacggttgctataactgatcaggcaactgccctcgtgcaagctggtgtacctgttattagattagcagctggtgaacctgattttgatactccagccccaatagcagaggctggcataaatgcaattcgtgaaggtcataccaggtatacaccaaatgcaggtacaatggaacttcggtcggctatttgtcataaattaaaagaggagaatgggttatcatacactcctgatcagattgtggtaagcaatggggcaaaacaaagtattgttcaggcagtgcttgcagtttgttctccaggggatgaggttcttattccagctccctattgggtgagttaccctgaaatggcaaggatggcagatgcaatgcctgtgattcttccgaccagcatatccgaagattttctattagatccaaagcttcttgaatctaaactgactgaaaagtcaagacttctgattctttgttctccatccaacccaacagggtctgtttaccctcggaaattgcttgaggagattgctgagattgtggctaggcatccgaggcttcttgtgatatcagatgaaatttacgaacacattatttatgcaccagcaactcataccagctttgcatctttgcctggtatgtgggataggactctcactgtaaatggtttctctaaggcctttgcgatgactggttggagacttggctatattgctggtcctaaacactttgtttctgcatgtaataagttacagagccagttcacgtcaggtgcaagtagcatctcacaaaaagcagctgtggctgctttgggactgggctatgctggtggagaagcagttgcaactatggtaaaagcatttcgtgagcggcgagatttccttgtcaagagctttggggaaattgatggtgtcaaaatttcagagcctcggggagcattttatctatttattgatttaagctcttattacggagtagaggttgatggatttggcaccatcaacaactcagaatctctttgccgatatttgctggataaatctcaagttgcgcttgtccccggggatgcatttggggatgacacatgtatccgtatctcctatgcagcatcgctttcgaccttgcaggcagctgtggagagaatcaagaaagcattggttactctcagacctcctgtcccagtgtaaaacatgaattactaatatttgcttatttgggatgtgctacagccaaacatgcataaataatatgtagtctgacccaaccctccatgttctctcattttatgtattcttaagtgcattcctgtacactgacattgttaatttgtgtgcaatttctcagttgatgattgaaaatcaaaataatcgagtgatatttatctct

SEQ ID NO: 174 - protein, 480 aa, Solanum lycopersicum
MTAASSSSLLGSSRIGSGPTISGLHSDSLNPTSISFSSNLQGLSLRSSGAKRQLYSRGTGSVVIAQNMDRVEVDLSLSPRVNSVKPSKTVAITDQATALVQAGVPVIRLAAGEPDFDTPAPIAEAGINAIREGHTRYTPNAGTMELRSAICHKLKEENGLSYTPDQIVVSNGAKQSIVQAVLAVCSPGDEVLIPAPYWVSYPEMARMADAMPVILPTSISEDFLLDPKLLESKLTEKSRLLILCSPSNPTGSVYPRKLLEEIAEIVARHPRLLVISDEIYEHIIYAPATHTSFASLPGMWDRTLTVNGFSKAFAMTGWRLGYIAGPKHFVSACNKLQSQFTSGASSISQKAAVAALGLGYAGGEAVATMVKAFRERRDFLVKSFGEIDGVKISEPRGAFYLFIDLSSYYGVEVDGFGTINNSESLCRYLLDKSQVALVPGDAFGDDTCIRISYAASLSTLQAAVERIKKALVTLRPPVPV

SEQ ID NO: 175 - DNA, 1723 bp, Solanum lycopersicum
gatcttaccaaccctcttccatttctctatataaaaaaatatttattccatcgcccaaatgaagttccatcgtccacttgaaaacccaactttgaaattgcttatagaacccaccaaatgactgctgcttcatcttcttctctactgggttcatcaagaattggttcaagacccaccatttctggacttcattcagattcactcaaccccagatcaatcaccttctcttcaaccctccaaggtctctctctcagatcttcagggtcaaagagacagctatactcacgtggaacaggttcagttgtcatagcacagaacatggacagagttgaggttgatctctctctcagccccagggtaaattcagtaaagccttcaaaaacggttgctataactgatcaggcaactgccctcgtgcaagctggtgtacctgttattagattagcagctggtgaacctgattttgatactccagccccaattgcagaggctggcataaatgcaattcgtgaaggtcataccaggtatacaccaaatgcaggtacaatggaacttcgatcggctatttgtcataaattaaaagaggagaacgggctatcatacactcctgatcagattgtggtaagcaatggggcaaaacaaagtattgttcaggcagtgcttgcagtttgttctccaggggatgaggttcttattccggccccctattgggtgagttaccctgaaatggcaaggatggcagatgcaacgcctgtgattcttccgaccagcatatctgaagattttctattagatccaaagcttcttgaatctaaactgactgaaaagtcaagacttctgattctttgttctccatccaacccaacagggtctgtttaccctcggaaattgcttgaggagattgctgagattgtggctaggcatccgaggcttcttgtgatatcagatgaaatttacgaacacattatttatgcaccagcaactcataccagctttgcatctttgcctggtatgtgggataggactctcactgtaaatggtttctctaaggcctttgcaatgactggttggagacttggctatattgctggtcctaaacactttatttctgcatgtaataagttacagagccagttcacatcaggtgcaagtagcatctcccaaaaagcagctgtggctgctttgggactgggctatgctggtggagaagcagttgcaactatgttaaaagcatttcatgagcggcgagatttccttgtcaagagctttggggaaattgatggtgtcaaaatttcagtgcctcggggagcattttatttatttattgatttaagctcttattacggagtagaggttgatggatttggcaccgtcaacaactcagaatctctttgccgatatttgctggataaatctcaagttgcgcttgtccctggggatgcatttggggatgacacatgtatccgtatctcctatgcagcatcgctttcgaccttgcaggcagctgtagagagaatcaagaaagcattggttactctgaaacctcctgtcccagtgtaatacattacacgcatcagtaatgtttgtagtctgacttgaccctccatgttctctcattatatgtattcttaagtgcattcctgtattctgaagttgttgatttgtgtgcaatttcttggtggatgattgaaaataaaaataattgagtgtgacatttatctcc

SEQ ID NO: 176 - protein, 480 aa, Solanum lycopersicum
MTAASSSSLLGSSRIGSRPTISGLHSDSLNPRSITFSSTLQGLSLRSSGSKRQLYSRGTGSVVIAQNMDRVEVDLSLSPRVNSVKPSKTVAITDQATALVQAGVPVIRLAAGEPDFDTPAPIAEAGINAIREGHTRYTPNAGTMELRSAICHKLKEENGLSYTPDQIVVSNGAKQSIVQAVLAVCSPGDEVLIPAPYWVSYPEMARMADATPVILPTSISEDFLLDPKLLESKLTEKSRLLILCSPSNPTGSVYPRKLLEEIAEIVARHPRLLVISDEIYEHIIYAPATHTSFASLPGMWDRTLTVNGFSKAFAMTGWRLGYIAGPKHFISACNKLQSQFTSGASSISQKAAVAALGLGYAGGEAVATMLKAFHERRDFLVKSFGEIDGVKISVPRGAFYLFIDLSSYYGVEVDGFGTVNNSESLCRYLLDKSQVALVPGDAFGDDTCIRISYAASLSTLQAAVERIKKALVTLKPPVPV

SEQ ID NO: 177 - DNA, 1813 bp, Triticum aestivum
agcttcaatggcgttctcctccctctccaccccttcctcctcctccccctcctcgtctttcaccctccccaccaagccctccccgggcgcaggctccctctccttctccaaggcgtccacggggaggttcaggatggcggcggtgagggcggaggcggtggacacgtccatcagcccgcgggtgagcgcgctgcggccgtccaagaccatggccatcaccgacatggccagcgcgctgcggcaggccggggtgcccgtcattggactcgccgctggggagcccgacttcgacacgccggcggtgatcgccgaggctgggataaatgcaatcagggatgggtctacaaggtacacacctaatgcagggactatggagctgaggaaagctatctgcaacaagcttcaagaggagaatggtctaacctacagcccagatcaggtgctagtgagcaatggagctaagcagtgcattacacaagctgttcttgctgtttgctcacctggtgatgaggttttgataccagcaccattttgggtcagctatcctgaaatggctaggttggctggtgcaacaccagtgatcctcccgacaagcatatcagacaatttcctgctgaagccagagtcacttgcctcagtgatcactgagaaatcaaggctcttgattctatgctctccatctaatccaacaggctctgtgtatcccaaggagctgcttgaggagattgctgctatagtcaagaagtatcctaggctcctggttctatctgatgagatctatgagcatattatctatcatcctgctaaacacacaagctttgctgcattacctggaatgtatgacaggacattaactgtaaatgggttttctaaggcttttgctatgactggctggcgacttggatacttagctgcccctaaacattttgtctcagcttgtggaaagatccaaagccagtacacatctggtgccagtagtatatcgcagaaggcagggcttgcagccttgaaccttggttatgccggcggtgaagcagtttcaaccatggtcaaagcattccaggagcgccgggattaccttgtaagaagtttcagggaactgccaggagtaaaaatatcagaacctcagggtgctttctatttgttcctcgacttcagctcctactacggatccgaggtagagggttttggcactatcaaggactctgagaccctctgcatgttcctgctagagaaagcacaggtcgcgcttgtccccggagatgcatttggtgatgacaagggtgttcgtatctcctacgctgccgcactgtcaacgctacaatctgccatggagaagataaaagacgcaatgtctctgctcaaggcccctgctgcggttcaataaaaatagcgtgctgaaggcattttcaccggaattacattaaaagcatgtccattgggaaaataggaagcatgccattgttgtacaacagatagttcaccatttttctggttgcaaacttgcgagcaatttgctttgtttcaaacttctcacttggtgtaatgtaattgtctttacctgcaggccagaaatgaaaataatatgttgctttgacaacctaagacgggaaataattgatgttcactgatttggaaaaaaaaaaaaaaaaaaaaaaaaaaaggggcggccgctctagagtatccctcgaggggcccaagcttacgcgtacccagctttcttgtacaaagtggtccctatagtgagtcgtattataagctaggcactggccgtcgttttacaacgtcgtgactgggaaaactgctagcttgg

SEQ ID NO: 178 - protein, 459 aa, Triticum aestivum
MAFSSLSTPSSSSPSSSFTLPTKPSPGAGSLSFSKASTGRFRMAAVRAEAVDTSISPRVSALRPSKTMAITDMASALRQAGVPVIGLAAGEPDFDTPAVIAEAGINAIRDGSTRYTPNAGTMELRKAICNKLQEENGLTYSPDQVLVSNGAKQCITQAVLAVCSPGDEVLIPAPFWVSYPEMARLAGATPVILPTSISDNFLLKPESLASVITEKSRLLILCSPSNPTGSVYPKELLEEIAAIVKKYPRLLVLSDEIYEHIIYHPAKHTSFAALPGMYDRTLTVNGFSKAFAMTGWRLGYLAAPKHFVSACGKIQSQYTSGASSISQKAGLAALNLGYAGGEAVSTMVKAFQERRDYLVRSFRELPGVKISEPQGAFYLFLDFSSYYGSEVEGFGTIKDSETLCMFLLEKAQVALVPGDAFGDDKGVRISYAAALSTLQSAMEKIKDAMSLLKAPAAVQ

SEQ ID NO: 179 - DNA, 2216 bp, Volvox carteri
ggaatcgtgctgcggtctcgtgctgcgcccgtacggagtaggaagggaaacagccgagaaaagctacctgcttacagcgcgcttgctggaccacacgcacaaaatcagatgaactgccgggctcactgatttgggtacctcgctatcccattagccgcctccgcatccttcaggatcggcagcagaaattggcagagacatgtttgttatgcacaattctaccgcacatagtagatcacacaacggatcaatcgcgtgcggaggtcgcacttgcatcgaacgccttgcgagggcgacgactccgcattgcccgattaccagcagcgttatcacagctacccgtgctaaaacaataagcatggccgcagcggcagcagcgcctacgtctaatgttgtcccggtcgacacgacgctcaatccccttgttgcgtcggtcaagccgtcaaagacaatggcgctgacagaccttgccacttcaatgaaggaagccggcatcgatgtcatcggccttgcagccggcgagcccgactttgacacccccgcgcccatcgtggaagcgggtgtggctgctctgcgggcgggctacacccggtacacccccaatacgggaaccaccgctctgaggaaggcaatttgcaagaagctccaggatgacaacggtctgagctacagtccggatgaggttgtggttagcaatggcgccaagcagtccatctggcaggcggtactggctaccgtgtcacccggagacgaggtcattatcccggcgccgtactgggtgtcgtacactgagatggtacggctggcgaatgcgacgcccgtggtggtgcctacgacccccgaggagggctttctgatgagccctgagaagttggcagcgaccctgactccccgtagtcgcttgctcatcttgtgcagcccctccaaccccacgggggctgtctaccccaaggagcacctggaggctttggcgcgcgtggtgggcgcccatcctaggctgctcgtactgtcggacgagatttacgaatacatcacgtatgcaccagccaaacatgtgtcctttggcgcgctgcctggcatgtgggaccgcaccctcacggtcaacggcttctccaaggcctacgctatgaccggctggcgtcttggctatctggctgcgccgcgcatttacgccaaggctgccgccatcatccaatcccagtccacttcaggcgcctcatctatcagccagcaggccgccttggcagccctggcgctggggccgggcggcggagagccggtgcagcagatggtcagggcatttcaagagcgacgggattttgtgtgcgctcggctgcgcggcatccctggagtcaacctggctgagcccagcggcgccttctacgtgctacccgaaatgagcgccttcttcggtcccggcgcacatgcggacggctttgggcccgtacccgactcggacaccttttgtcgctacctcatcgaaaaggccaacgtcgctgtcgtgcccggggacgcctttggcgctgacagctgcatccgcatttcctacgccgcgtccttggagacgctgggcaaggcgctggaccggattgcagcctccctggaccccaaaatctataaacgccgtacgggctctagctaagattctggatcctggatctgcctgtatcatttactcgacaactatggacgtagcttaatctggcgttgataggagttgtgattgttcaaactggtgagcgagtcgctccgaaagaggaagggacagttagttgctaggatgagcttcacagccgttcccgagcagggcttgctgtgaaggtactcctcgggacaggggacggctgggaagctctggtctgggcttaaagctgtgcgcaggtggtggaaacagggttaggtgctttggaggggcgtttctcgacgggactggatttcgcaacgccagacaatgacatgcgcgccgtcccatttcgaacccccccggctggtggcgccatgccgaaatataggttgtgttattatgcgctgcttttttggggctccgttgcttaccttactaccatgtttatgcgagcttaggtaaatgtggttggggttgtatgtggcagggacaagggtggctgaccgtaaatgacacgatgtgctttgcccggcgtgagctcctccgtcgagttgtgaatgtaactctgcttctgtaatacgtgcattccgtt

SEQ ID NO: 180 - protein, 480 aa, Volvox carteri
MFVMHNSTAHSRSHNGSIACGGRTCIERLARATTPHCPITSSVITATRAKTISMAAAAAAPTSNVVPVDTTLNPLVASVKPSKTMALTDLATSMKEAGIDVIGLAAGEPDFDTPAPIVEAGVAALRAGYTRYTPNTGTTALRKAICKKLQDDNGLSYSPDEVVVSNGAKQSIWQAVLATVSPGDEVIIPAPYWVSYTEMVRLANATPVVVPTTPEEGFLMSPEKLAATLTPRSRLLILCSPSNPTGAVYPKEHLEALARVVGAHPRLLVLSDEIYEYITYAPAKHVSFGALPGMWDRTLTVNGFSKAYAMTGWRLGYLAAPRIYAKAAAIIQSQSTSGASSISQQAALAALALGPGGGEPVQQMVRAFQERRDFVCARLRGIPGVNLAEPSGAFYVLPEMSAFFGPGAHADGFGPVPDSDTFCRYLIEKANVAVVPGDAFGADSCIRISYAASLETLGKALDRIAASLDPKIYKRRTGSS

SEQ ID NO: 181 - DNA, 1233 bp, Vitis vinifera
atggaggttgatatctcactgagtcccagagtaaattctgtaaagccttctaaaacagtagctattactgaccaagcaactgctcttgtacaagctggagtccctgttatacgattagcagctggagaacctgattttgatactccagctgtgatagctgaggctgggataaatgcaattcgtgaaggttacacaaggtacactccaaatgcgggtactttggaagtccgttcagcaatttgtcataagttgaaggaggaaaatgggctctcatatacacctgatgagattttggttagtaatggagccaaacagtctattcttcaagcagtgcttgcagtttgctccccaggagatgaggttataattccagctccattctgggtgagttacccagaaatggcaagactggcagatgcaacacctgtcattcttccaacacttatctctgaaaattttctcctagatccaaagtttcttgagtccaaactcactgaaaagtcaagattgctgattctatgttctccatccaacccaaccggatcagtttactccaggaaactgcttgaagagattgctcagattgtagcaaggcaccccaggcttctggttttgtctgatgaaatatatgaacatattatttatgcaccagcaactcatacaagctttgcagctttgccaggcatgtgggagaggactttgacagtcaatgggttttctaaggccttcgcaatgactggctggcggcttgggtatcttgctggtcctaaacactttgttgctgcatgtggaaagattcagagtcagttcacttcaggtgccagtagcatatctcagaaagcagcagttgctgcattgggaatgggctatgctggtggggaagctgtttccacaatggtaaaagcattcagggaacggcgagatttcttggttaaaagctttggagaactggagggtgtcaagatatcagagccccagggagctttttacctctttcttgacttcagctcttactatggggcagaggctgaaggttttggtataattgagaattcagagtccctctgccgatatctgctggaccaggcccaggttgcccttgtcccaggggatgcatttggagacgacaagtgcattcgcatatcctatgctgcatccctctccaccctacatgcagccgtggagagaattaagaaagcagttgttcctctttggcctcctgtccctgtctaa

SEQ ID NO: 182 - protein, 410 aa, Vitis vinifera
MEVDISLSPRVNSVKPSKTVAITDQATALVQAGVPVIRLAAGEPDFDTPAVIAEAGINAIREGYTRYTPNAGTLEVRSAICHKLKEENGLSYTPDEILVSNGAKQSILQAVLAVCSPGDEVIIPAPFWVSYPEMARLADATPVILPTLISENFLLDPKFLESKLTEKSRLLILCSPSNPTGSVYSRKLLEEIAQIVARHPRLLVLSDEIYEHIIYAPATHTSFAALPGMWERTLTVNGFSKAFAMTGWRLGYLAGPKHFVAACGKIQSQFTSGASSISQKAAVAALGMGYAGGEAVSTMVKAFRERRDFLVKSFGELEGVKISEPQGAFYLFLDFSSYYGAEAEGFGIIENSESLCRYLLDQAQVALVPGDAFGDDKCIRISYAASLSTLHAAVERIKKAVVPLWPPVPV

SEQ ID NO: 183 - DNA, 1634 bp, Zea mays
gacgattgtacactactcgtcagatgacaactcaaacaacgtcagtcccactgctgctaaagctgagcccccagacccccagcagctagcagccgcctcctcgtcaggcccttcctccttcaccctcgccaaacccgcctcctccggtccgaactccgtctgcttcatctgagcgtccgggaggacaaaacacgcggcgaggaccaggatggcgattgtgcgggaggaggcagtggacacgtccatcagcccaagggtgagcgcgctgcggccgtccaaaaccatggccatcaccgatcaggccatggcgctgcggcaggccggcgtgccggttatcggtctagccgcgggggagccagacttcgacacgccgcccgcgatcgcggaggccgggatggatgcaattaggaatggttatacaagatacactcctaatgctgggactttggagctgaggaaggctatttgtactaaactccaggaggagaacggggtatcctacctcccagatgaggtgctggtgagcaatggagctaagcaatgcatcacacaagctgtgcttgcagtttgctcacctggtgatgaggttttgattccagccccatattgggtcagttatcctgagatggctagactggctgatgcgactccagtgattcttcctacaaacatatcagagaatttcttgttaaggccagagttgcttaccgacaagatcaatgagaaatcgaggctcttaattctctgctctccatctaatccaacagggtcagtatatccaaaggagttgcttgacaaaatagctgatatagtcaagaagcatccgaggcttttggttttatctgatgaaatttatgagcatattatctatcagcctgcaaaacacacaagctttgcttcactacctggaatgtgggaaagaacattaactgtaaatggtttttctaaggcttttgcaatgacgggttggcgtcttggttaccttgcagcccctaaacattttgttgcagcatgtggaaagatccaaagccagttcacctcaggtgccaacagcatatcacagaaggcagggcttgcagctctgaatcttggctatgctggtggtgaagcagtatcaactatggtcaaagcattccaggaacgccgtgactatcttgtgaaaaatttcaaggaactgcctggtgtgaaaatatcagaacctcagggtgccttttatttgttcattgacttcagcgcctactatgggtctgaagtagaggggtttggcactatcaagaattccgagtccctttgcatcttcctattagagaaagcacaggttgcccttgtccctggtgacgcatttggggatgacaagtgcattcgtatttcatatgctgcatccctaactacacttcagactgcgatgtcaaaattaaaggaagctgttgctctgctcaagccctgtgttgctgcgtagcaagatcactaaattgcaataaggagtgaccaaggcacctttaactaacctttcacgttattttaaacacaatgttcgaattgtttgggcagacttggtccgttgtttttatatgtaacattatggatttatgatgtgtacatgcaaataaaaatggtttgtttaaaaaaaaaaa

SEQ ID NO: 184 - protein, 416 aa, Zea mays
MAIVREEAVDTSISPRVSALRPSKTMAITDQAMALRQAGVPVIGLAAGEPDFDTPPAIAEAGMDAIRNGYTRYTPNAGTLELRKAICTKLQEENGVSYLPDEVLVSNGAKQCITQAVLAVCSPGDEVLIPAPYWVSYPEMARLADATPVILPTNISENFLLRPELLTDKINEKSRLLILCSPSNPTGSVYPKELLDKIADIVKKHPRLLVLSDEIYEHIIYQPAKHTSFASLPGMWERTLTVNGFSKAFAMTGWRLGYLAAPKHFVAACGKIQSQFTSGANSISQKAGLAALNLGYAGGEAVSTMVKAFQERRDYLVKNFKELPGVKISEPQGAFYLFIDFSAYYGSEVEGFGTIKNSESLCIFLLEKAQVALVPGDAFGDDKCIRISYAASLTTLQTAMSKLKEAVALLKPCVAA

SEQ ID NO: 185 - DNA, 1757 bp, Zea mays
tgcgtgtcgggcttaccaagcggagcagtataacgcaggggcttggtccagcgacttctcagaaacgcgccaccagccaacgagcaagggccgcagccggagctccaatggcctccttctcctccctctctgcctcctcctccacctccaccccgtccttcaacctccccgcaaaaacctccgctggcacaggctccctgtcattccacagggcgagggagtcgcagaagtccagggccaggatggtgacggtgcgggcggaggcggttgacacgaccatcagcccgcgggtgaatgcgctcaggccgtccaagaccatggccatcaccgaccaggccacggcgctgcgacaggccggcgtgccagtcatcggactcgccgctggggagcccgacttcgacacgccagccgtgatcgccgaggctgggataaatgccatcagagatggggccacaagatacacgcctaatgctggaactctggagctgaggaaggctatctgcaaaaagcttgaggaggagaatggtctatcatactccgccgatcaggtgctagtaagcaatggagccaagcagtgcattacacaagcagtactcgctgtctgctcacctggcgatgaagttttgatacctgcaccatattgggtcagctaccctgagatggctagactggctggtgcaacgccagttattctccctacaagcatatcagacaattacctgctaaggccagagtcacttgcctcagtgatcaatgaaaattcaaggatcttgattctctgctctccatctaatccaacagggtctgtgtatcctaaggagttgcttgaggagattgctgctatagtcagaaagcaccctagactcctagttttatccgatgagatctatgagcatattatctatcaacctgctaaacacacaagctttgcttcattgcctggaatgtgggaaagaacgttaactgtgaatggattttctaaggcttttgctatgactggttggagacttggatacttagctgcccctaaacattttgtcgcggcctgtggaaagatccaaagccagtatacctctggagccagtagtatatcacagaaggcagggcttgcagctttgaacctaggttatgctggtggtgaagcagtatcaaccatggtgaaagcattccaggagcgtcgtgattaccttgtaagaagctttagggagctgccaggtgtcaagatatcggaacctcagggagccttctatttattcatcgacttcagctcgtactatgggtctgaggtggaaggttttggtaccatcaaggactctgagtccctctgtctgttcctgttggagaaggcacaggttgcgcttgtccctggggatgcatttggcgatgacaagggtgttcgcatttcatatgctgcagctatgtcgacactgcaaactgcaatgggaaagataaaagaagcgatggctctgctcaggccccctgttgccgtttaacaaaaccaacgtatcgctaatcagttgtggaccaaaggcttctgcaatgcactatcatattaaatacattcagttgacatgatctatcttcttccctttatggaaaaaaatgttgctgctgtcatttggctttggtttgtatctgaagatttatatgtacttgctataatatagatgaactgtgcaacgctttttttacctgcaagaatagaaatggtaaacatgactttattttgacaatttgagtcgtgaatgtttcatatt

SEQ ID NO: 186 - protein, 461 aa, Zea mays
MASFSSLSASSSTSTPSFNLPAKTSAGTGSLSFHRARESQKSRARMVTVRAEAVDTTISPRVNALRPSKTMAITDQATALRQAGVPVIGLAAGEPDFDTPAVIAEAGINAIRDGATRYTPNAGTLELRKAICKKLEEENGLSYSADQVLVSNGAKQCITQAVLAVCSPGDEVLIPAPYWVSYPEMARLAGATPVILPTSISDNYLLRPESLASVINENSRILILCSPSNPTGSVYPKELLEEIAAIVRKHPRLLVLSDEIYEHIIYQPAKHTSFASLPGMWERTLTVNGFSKAFAMTGWRLGYLAAPKHFVAACGKIQSQYTSGASSISQKAGLAALNLGYAGGEAVSTMVKAFQERRDYLVRSFRELPGVKISEPQGAFYLFIDFSSYYGSEVEGFGTIKDSESLCLFLLEKAQVALVPGDAFGDDKGVRISYAAAMSTLQTAMGKIKEAMALLRPPVAV

SEQ ID NO: 187 - DNA, 1266 bp, Aureococcus anophagefferens
atggccgcaccggcccgccggtccgccgcgcgcagcttgtccgcgtggagcaacgtgcagagcgcgcccgccgatcctatcttgggcttgacgcaggacttcctcgcggacacggacgccaagaaggtctccctgggcgtcggcgcgtaccgcgacgagaacggcaagccctacgtgctgccgtccatcgccgaggcggagaagcgcgtcgtcgcgtcgctgacggaccacgagtacgcgccgatcaccggcgacgccaagttcctcgcgtcgagcctcgagttcgcctacggcgcgggctcggcgccgctcgcggagaagcgcgtcgcggccacccaggccctcagcggcacgggctgcctccgcgtcgccgcgcagctcctcgagcgcctgccgtcgctcaccggcggcgacgcgagcaagaagcaggccatctacgtgccggacccgacgtggagcaaccacctgaacatcttccgcgacgcgggcctcgagatccgcacgtaccgctacctcgacgcggcgacgcgcacgaagctcgacttcgacgcgatgctcgaggacctgtcggccgccgagtccggcgcgacgatcctgctccacgcctgcgcgcacaacccgacgggcgtcgacccgtccatggaccagtggaaggccctgtcggcggccctcaaggccacgggcgcgcagctcttcttcgactgcgcgtaccagggcttcgcgtccggcgacgcggagcgcgacgcgggcggcctccgccacttcgtcgccgagggccacacgctcatgctcgcccagtcctacgcgaagaatttcgggctctacggcgagcgcgtcggcgcgctgtccatggtctgcgcggacgccgcggaggcgcgcgcgctcgagtcgcagctcaaggccgtcatccgccccatgtactcgagcccgccggtgcacggcgcgcgcgtcgtcgccgaggtcctcggcgatgcccaactccgcgccaagtggacggccgagtgcaaggccatggccgaccgcatctccgagatgcgcgcggcgctcaaggccaagctcgcggacgcggggtccacgcgcgactgggcccacatcacggaccagatcggcatgttcgcctacacggggctcacggccgaccaggtccaggccatgcgcgacgagttccacgtctactgcacgctcgacggccgcatctccgtcgcggggctcacgccgtcgaacgtcgaccacgtcgccaaggcgatccacgccgtctccaagtag

SEQ ID NO: 188 - protein, 442 aa, Aureococcus anophagefferens
MQTVLAVLCLVPAAALVRGAPSRVAATPRKASPSAYLSEIPQGPPDAILGIAAAFRASNADDKVNVCVGAYRDDVGVPYVLPSVTEAERRLLDRGEKKEYAPIEGLADFRQKALEFAYGEDCAALKEGRIAGVQTLSGTGACRVAGEFYARFLPEGTAVYVSDPTWGNHIPIMELAGLEVRKYRYLDRETNGLDYEAFLEDIDAAPAGSVFLLHACAHNPTGVDPTRDQWDAVSKKILAKGHHVLMDCAYQGFASGDAEADAFAIRKFLDDGHSLLLAQSFAKNFGLYGERVGTLSVVCKDTEEVERVMSQLKRIIRPMYSSPPIHGALIVKEVLSDDALRAQYYDECAQMAERIGGMRVRLREEIEAAGSEHDWTHVTDQIGMFAFTGMTSDMCDTLTADYSIYLTKDGRISVAGVNSGNIKYIAKAVHEVTHGKEIGVAA

SEQ ID NO: 189 - DNA, 1329 bp, Aureococcus anophagefferens
atgcagaccgtgctcgctgtgctctgcctcgtccccgcggccgcgctggtgcgcggcgccccgagccgcgtcgctgccacgccgcgcaaagcgtcgccgagcgcctacctgagcgagatcccccagggtccgccggacgccatcctcggcatcgccgcggccttccgcgcgtccaacgccgacgacaaggtgaacgtctgcgtcggcgcgtaccgcgacgacgtcggcgtgccctacgtgctgccgtcggtcaccgaggcggagcgtcggctgctcgaccgcggcgagaagaaggagtacgcgcccatcgagggcctcgcggacttccgccagaaggcgctggagttcgcctacggcgaggactgcgcggcgctcaaggagggccgcatcgccggcgtgcagacgctgtcgggcacgggcgcgtgccgcgtcgcgggcgagttctacgcgcggttcctgcccgagggcacggccgtctacgtctcggacccgacctggggcaaccacatccccatcatggagctcgcgggcctcgaggtgcgcaagtaccgctacctcgaccgcgagacgaacggcctggactacgaggcgttcctcgaggacatcgacgccgcgccggcgggaagcgtcttcctgctccacgcctgcgcgcacaacccgacgggcgtcgacccgacgcgggaccagtgggacgccgtgtcgaagaagatcctcgccaagggccaccacgttctcatggactgcgcgtaccagggcttcgcgtccggcgacgcggaggcggacgcgttcgcgatccgcaagttcctcgacgacggccactcgctcctgctggcccagtccttcgcgaagaactttggcctctacggcgagcgcgtcggcacgctctccgtcgtctgtaaagatacggaggaggtcgagcgcgtcatgtcgcagctgaagcgcatcatccggcccatgtactccagcccgcccatccacggcgccctcatcgtcaaggaggtgctcagcgacgacgcgttgcgcgcccagtactacgacgagtgcgcgcagatggccgagcgcatcggcggcatgcgcgtccgcctccgcgaggagatcgaggccgcgggctccgagcacgactggacccacgtcacggaccagatcggcatgttcgccttcacgggcatgacctccgacatgtgcgacacgctcacggccgactactccatctacctcacgaaggacggccgcatctccgtcgcgggcgtcaactccggcaacatcaagtacatcgccaaggccgtccacgaggtcacccacggcaaggagatcggcgtcgccgcgtaa

SEQ ID NO: 190 - protein, 416 aa, Aureococcus anophagefferens
MKLAYFASLATAQECISRWGDVAVPPADPVLGIKAQFVADDTPTKIGLSVGAYRDDDGNPWVLPPVEAARERLFGPNGTTTHEYLSIDGFERYNKLAQGLLYGPEEANHDVVTVQALSGTGALRLAMEFLNRHYPGPRTAYIPAVTWSNHWNIFKDAGWADSRPYTYLDKAGLRLEWSSLLADLEAAPEGSVVLLHLCAHNPSGVDPSRDQWKELAALVKRKGLFPLFDSAYLGFATGDLDADAWPFRYFLQQGLAPWACVSFSKNFGLYSERTGAVHATVASPHEADAVRGHLKKVARAMYSNPPAFGARVVAAVLDDPDLKAAWLDTLKVMSSRIGDMRTALRAKLDSLDTGRDWSHITSQIGMFSYTGMTKSEVLKIREKHHVYMLESGRISMAGINTKNVDQLATAIADVLE

SEQ ID NO: 191 - DNA, 1296 bp, Aureococcus anophagefferens
atgctagtcgcgccgcgccgcgccgccggcagcgcgcgggctttgggcctcttcgccggcgtcgaggccgtgccccaggacccgatcctcggcctcgtcgccgagttcaaggccgacgccttcccggccaaggtgaacctcgcccagggcgcctaccgcaccgagggcggcgagccgctgctcctcgaggccgtcagggaggcggagcggcgcgtcgtcgcccggggcgcgtcgaaggagtacctgcccgtcgagggcctccggagctttgtcgacgcggccgcggcgttcgcgctcggcgccgactcgccggcgctcctcgacgggcgcgtcgcgtcgctccaggcgctgtcgggcacgggctcgctgcgcgtctgcgcggagatgctccgggacgtcgccggcgtcgccgaggtgcacctgccgcggccgtcctgggcgaaccacgccgcgatcttcgccaaggccgggctcgccgtcggggactacgcgtacctcgacgcgacgcggacgtccctcgactttgaagccatggtcgcggacctcgaacggctcccgcccgactccgtcgtcctcatgcacgccgcggcccacaacccgagcggcgtcgacccgacgcgcgaccagtggcgggcgctcgcggacctcttcgcggagaaaaaactcgtccccctcttcgacacggcctaccagggcttcgcgtcgggcgacgaggaggccgacgccttcgccgtgcgactcttcgaggcccggggccacgcgcccatcctctgccagtccttcgcgaagaacctgggcctctacggcgagcgcgtcggcgcggtccacgtcgtctgcgactccgaggccgaggcggcgaacctgctgtcgcgcgtcaagcagctcgtcgtgcgacccatgtactcgagcccgccactccacggagcgagcctcgccgcggaggtgctcggcgacggcgagctccgggagcggtggcgcggcgagctcctcgcgatggcgcagcgcatcgtcgacgtccgcgccgcgttgcggggcgagctcgagcgcctcgacgcggcgccgccgggcgcccacggctggcggcacatcacggaccagatcggcatgttcgccttcacgggcctcaccgcgccgcaggtccggtccatgcgcgcggtggagcacgtctactgcacggagaacggccgcatgagcctcgcgggcctcgccgccgcggacgtgccctacgtcgccgccgccgtcaagcgcgccacggacgcgatcccctacgaggcgcgcgtcgccgtcgccgcgtga

SEQ ID NO: 192 - protein, 421 aa, Aureococcus anophagefferens
MAAPARRSAARSLSAWSNVQSAPADPILGLTQDFLADTDAKKVSLGVGAYRDENGKPYVLPSIAEAEKRVVASLTDHEYAPITGDAKFLASSLEFAYGAGSAPLAEKRVAATQALSGTGCLRVAAQLLERLPSLTGGDASKKQAIYVPDPTWSNHLNIFRDAGLEIRTYRYLDAATRTKLDFDAMLEDLSAAESGATILLHACAHNPTGVDPSMDQWKALSAALKATGAQLFFDCAYQGFASGDAERDAGGLRHFVAEGHTLMLAQSYAKNFGLYGERVGALSMVCADAAEARALESQLKAVIRPMYSSPPVHGARVVAEVLGDAQLRAKWTAECKAMADRISEMRAALKAKLADAGSTRDWAHITDQIGMFAYTGLTADQVQAMRDEFHVYCTLDGRISVAGLTPSNVDHVAKAIHAVSK

SEQ ID NO: 193 - DNA, 1251 bp, Aureococcus anophagefferens
atgaaactcgcatacttcgcgtcgctcgcgacggcccaggagtgcatcagccgctggggcgacgtcgccgtgccgccggcggacccggtgctgggcatcaaggcccagttcgtcgccgacgacacgccgacgaagatcgggctgagcgtgggcgcctaccgcgacgacgacggcaacccctgggtcctgccgcccgtcgaggccgcgcgcgagaggctcttcggccccaacggcacgacgacgcacgagtacctgagcatcgacggcttcgagcgctacaacaagctcgcgcagggcctgctctacggccccgaggaggcgaaccacgacgtcgtcaccgtgcaggcgttgagcggcacgggcgcgttacgcctcgccatggagttcctgaaccgccactacccgggcccgcggaccgcgtacatccccgccgtcacgtggagcaaccactggaacattttcaaggacgcgggctgggccgactcgcggccctacacctacctcgacaaggcggggctgcggttggagtggtcgagtttgttggcggacctcgaggcggcgccggaggggtccgtggtgttgctgcatctctgcgcgcacaacccttcgggcgtcgacccatctcgcgaccagtggaaggagctcgcggcgttggtcaagcgcaagggtctgttcccgctcttcgactcggcctacctcggcttcgcgacgggcgatctggacgccgacgcgtggcccttccgctactttttgcagcagggcttggcgccgtgggcgtgcgtgtccttctcgaagaacttcgggctctacagcgagcgcacgggcgccgtccacgcgaccgtcgcgtcgccccacgaggccgacgccgtgcggggccacctgaaaaaggtcgcgcgcgccatgtactcgaacccgccggccttcggcgcgcgcgtcgtcgccgcggtcctcgacgacccggacctcaaggccgcgtggctcgacacgctcaaggtcatgtcgagccgcatcggcgacatgcgcacggcgctccgggccaagctcgactcgctggacacgggccgcgactggagccacatcacgtcgcagatcggcatgttctcctacacgggcatgaccaagtccgaggtcctcaagatccgcgagaagcaccacgtctacatgctcgagtcgggccgcatctccatggccggcatcaacacgaagaacgtcgaccagctcgccacggccatcgccgacgtcctcgagtag

SEQ ID NO: 194 - protein, 431 aa, Aureococcus anophagefferens
MLVAPRRAAGSARALGLFAGVEAVPQDPILGLVAEFKADAFPAKVNLAQGAYRTEGGEPLLLEAVREAERRVVARGASKEYLPVEGLRSFVDAAAAFALGADSPALLDGRVASLQALSGTGSLRVCAEMLRDVAGVAEVHLPRPSWANHAAIFAKAGLAVGDYAYLDATRTSLDFEAMVADLERLPPDSVVLMHAAAHNPSGVDPTRDQWRALADLFAEKKLVPLFDTAYQGFASGDEEADAFAVRLFEARGHAPILCQSFAKNLGLYGERVGAVHVVCDSEAEAANLLSRVKQLVVRPMYSSPPLHGASLAAEVLGDGELRERWRGELLAMAQRIVDVRAALRGELERLDAAPPGAHGWRHITDQIGMFAFTGLTAPQVRSMRAVEHVYCTENGRMSLAGLAAADVPYVAAAVKRATDAIPYEARVAVAA

SEQ ID NO: 195 - DNA, 1556 bp, Emiliania huxleyi
atgtcgtcgcacgtgctgaatcgctcccacctccttctctcccgctcccgcagcacggtcgccgctgccgccgccaccgcctctcgccactctgcgtggcagggcacccaggcggtgccggccgacccgatcctcggactcgtcgccgccttcaaggcggacgccgctccgcgaaaggtgaacctggcgcagggagccttccgcacggacgaggggctgccacttgtcctgccgtcggtggtggaggcggagaggcgcgtgagctccgcgctcgccagcggcgccatcgacaaggagtacctcccgatcgagggcgatgccaccttccgcacactttcggcgaagctcatctttggcgacgagagcgctgcgctggcggagggccgctgcgccacgctgcagaccctctccggcaccggcgctgtgagcgttgccgccgccgcgctctgccggatggcgggcgcgcggaccatccacgtgccggacccatcgtgggggaaccacgggcacatcttcaggagcgccgggctcgaggtgcagaactacgcctacctggaccaccgcacaggcaccacactcgactttgacggcatgcgcgccgcactcagcggcctgcctcgcggctccgtggtgctgctgcacgcctgcgcgcacaacccgaccggaatcgacccatccggagagcagtggcaggagctggccgcgctcttcgcgggtcgcgggcttgtcgcgctcttcgactctgcctaccagggctacgcgagcggcgacctcgacgccgacgccgcctcggtgcgcgcctttgaggcggcgggcgtcctcccggtggcgtgccagtcatacgcgaagtcgctcggcctatacggcgagcggattggcgcggtcaacttcgtgtgcgcgtcgcgcgaagaggcggaggcggtgctgagcaccgtcaagcagaccatcgtgcgccccgcctactcgtcgccgccgctgcacggcgcacgccttgcggccgaggcgctcgccccctcgacagcgtcggtctcggcacccgccggaggcagcacgcccctctccccccgccggcaggtactcggcgacgcggcgctctttgcgcagtggcgcggcgagctgcgtgggatggcgaatcgcgtgcaccgcatgcgcgtgctgctggcggacgcgctgcgcgccgagggcgcgccctcgcccgacggcggcgattggggccacgtcgtcgaccagatcggcatgtttgcgtacacggggctgagcgcgagccacgtggattcgctgcgcgagaggcgccacgtctacctcacccgcgacggccgcatgtcgatggcggcaatgaagccggccgacattgagtacgttgcgcgggcggtgcgctccgtgttggcggagtgagtgccggatggagagcgggaggcatccggccaggaagcaggacgtcgatcgtgattggccttcacatcaccgcaagccggcgcgatactccccacgaggttgtacgtgcgtaaccgcaaccgcgcaacgtacaaatgctcttgttacgcgcaccggggctt

SEQ ID NO: 196 - protein, 464 aa, Emiliania huxleyi
MSSHVLNRSHLLLSRSRSTVAAAAATASRHSAWQGTQAVPADPILGLVAAFKADAAPRKVNLAQGAFRTDEGLPLVLPSVVEAERRVSSALASGAIDKEYLPIEGDATFRTLSAKLIFGDESAALAEGRCATLQTLSGTGAVSVAAAALCRMAGARTIHVPDPSWGNHGHIFRSAGLEVQNYAYLDHRTGTTLDFDGMRAALSGLPRGSVVLLHACAHNPTGIDPSGEQWQELAALFAGRGLVALFDSAYQGYASGDLDADAASVRAFEAAGVLPVACQSYAKSLGLYGERIGAVNFVCASREEAEAVLSTVKQTIVRPAYSSPPLHGARLAAEALAPSTASVSAPAGGSTPLSPRRQVLGDAALFAQWRGELRGMANRVHRMRVLLADALRAEGAPSPDGGDWGHVVDQIGMFAYTGLSASHVDSLRERRHVYLTRDGRMSMAAMKPADIEYVARAVRSVLAE

SEQ ID NO: 197 - DNA, 1392 bp, Emiliania huxleyi
acctagcacggcgacgcctcggcgcatccgcagaggtgctagttcgcacctcttcctgccgcatgggcatgagatcgtacatgacctggaacgaggtgcccgccgctcccttggaccccatcctcggcgtcaaccagaaatttcaggctgacacatccgcggaaaaggtcaacgtgtcgatcggcgcctaccgtacggatgagggcaagcccatggtgctcagctgcgtcaagaaggcggaggcgctgctactggagcagagtgacctcaacaaggagtacctgcctcagcgcggtgacgccacctacgttcagctctgccagaagatgctctttggggagaagtcaaagctgctggcgagcggggtggtggcgacggcgcagacgctgtcgggcacgggcgcgctgcggctcggcgccgagttcatgaagaagttcgccaagggcaagacggtctacatctccaatccgacgtggggcacgcacaactccatcatgacccaggctggggtgcccttctctcactaccgctactggaacgccgcgggccgtgacctcgacctggcaggcatgctggaggacatcgaggcggcgcccgagggcagcgtgatcatgctgcacgccgcggcccacaacccgaccggggtggacccgaccgcggagcagtggggcgagatcatgaccgtctgcaaggcgaagaagcacgtctgctggttcgactcggcgtaccagggcttcgcgacgggcgacttggacatcgacgccaccgcgatgcgcgcctttgccgacgaggggttgccgctcttcgtcagccagtccttcgccaagaactttggcctctacggcgagcgcgtcggcaccttctcaatcacttgcgacacgcccgaggccgtcaaggcggtcatgtcgcagctcgacatcatcatccgcaacctgtactccaacccgcccaagcacggcgcaaacatcgtcaagaccgtgctctccgaccccgcgctgtaccaggagtggcgcgacgagctcaaggccatgtcattgcgcatccaggacatgcgcacggcgctgtacgacgagctcaccagcctcggcacgccgggcagctggacgcacatcacctcgcagatcggcatgttctccttcaccggtctcagcccggagcagtgcacgcagatggtcgagaagcaccacgtgtacatgctgaacaatggccgcgtctccatggccggcgtcacctcgaagaacgtcaagtacatcgccaaggccatcgacgacgtggtgcgcaacttctgagagcgttgacgattgtcccgccccgcgcggccggttgcgctgtgcttgcataatggtccatttacgtgtgtggaggcagaactacataggagacagagagaga

SEQ ID NO: 198 - protein, 408 aa, Emiliania huxleyi
MGMRSYMTWNEVPAAPLDPILGVNQKFQADTSAEKVNVSIGAYRTDEGKPMVLSCVKKAEALLLEQSDLNKEYLPQRGDATYVQLCQKMLFGEKSKLLASGVVATAQTLSGTGALRLGAEFMKKFAKGKTVYISNPTWGTHNSIMTQAGVPFSHYRYWNAAGRDLDLAGMLEDIEAAPEGSVIMLHAAAHNPTGVDPTAEQWGEIMTVCKAKKHVCWFDSAYQGFATGDLDIDATAMRAFADEGLPLFVSQSFAKNFGLYGERVGTFSITCDTPEAVKAVMSQLDIIIRNLYSNPPKHGANIVKTVLSDPALYQEWRDELKAMSLRIQDMRTALYDELTSLGTPGSWTHITSQIGMFSFTGLSPEQCTQMVEKHHVYMLNNGRVSMAGVTSKNVKYIAKAIDDVVRNF

SEQ ID NO: 199 - DNA, 2045 bp, Emiliania huxleyi
atggttggggggctgctgctgctccacgccgccgcgggcgtggttctgagctcgtacctctcgaaggtgccgcagggtgcagcggacaagatcctcggcatcgcacaggccttccagcgcgacgagcgggcggacaaggtcaacctcgtcgtcggcgcataccgcgacggcggcgggtctccgtgggtgttgccgacggtccgcgaggccgagcagcggctgatcgcgcgcgggcagaacaaggagtacgcgagcatcgtcggcgtgcccgccttcctggaccgcgcgctcgagtttgcgtacgggcccggctgcacggcgctgagcgagggccgcgttgcggcggtccagacgctgtcgggcaccggcgcgtgccgcctggcggcggacttttacgcgcgctttctcccgccgggcaccgccgcctacgtgtcggagcccacctggcccaaccacatccccatctttgagactgcgggcctcgaggtgcgcaagtaccgctacctcggcgccgacggccggttcgacgtggagggtatgctggaggacatcgggcaggcgccggccggctcggtctttgtgctccacgcgtgcgcgcacaacccgaccggcgttgaccccaccgccgccgactggaagcgcatctccgacgcgctgcttgcggccggccagcacatcctcgtcgacatggcgtaccagggcttcgcgtccggggacgcgcggcgggacgcggcggcgctctccctcctcgccgaggcgggccactcgctcgccctcgcgcagtccttcgcgaagaactttgggctctacggcgagcgagttggctccctctcgctggtgtgcgccgacgcggccgaggcgtcgcgcgtcgagtcgcagctcaaactgctgatccgtccgatgtactcctcgccgcccatccacggcgcgctgctcgtcaacgaggtgctctccgacgcggcgttgcgcgcccagtacgacgacgagtgcgcgtcgatggcgcggcgcatcagcgacatgcgcgcgctgctcgtcgcggagctcagcgcggcggggtcgcagcgggactggagccacgtgacggaccagattggcatgttcgcgtacaccggcctcaccgccgcacagtgtgacgcgctgatggaggagcatgcggtctacctcacccgcgacgggcgcatttcgatggcgggcgtcaacgagcagaacgccggtgtcatcgccgcggcgatcgtcgccgtcgcgggctgagctgagctgccgaggccgtcgttctctcctcgatcggctaggagcttctggcggccaggcaccgttcagacctgcctcctaccggggggatccacatccaggtgcagttttgcgcgtggtccgtggaagaggctttctgtacacacacaagtatacacagagggtgttagaaggatgccgaccccgaacgcgaggtacgtacagatgtgcgcgctctctagcgcgctctccacggctcgccgactagaggcgatgcctcactcgcactgcgagctcctgcgtcgtatacctcgcacactctcacactgtgctcgatcctcgaaggttgcccgcagcacgcattctgcaacaagcgggaatcgccgatcgtgtctagtagtggtcaaaactccactctcgctgctgctgctgcctgcccgcctcgcggcgagaggcgaggcgattaggcgagctcgggcgcgaggatggagacgggcgaaacgggcgagggctgcagcgccagaggcggcggcttggacacccggttggtcaagtcggcgagaatcttgtcggaggccgcgatggatgggggtgcgacctcggagtagctcttgacgaccggcggcaagcagaagacaaagtcgcgaatggcccgcacgcttccaaaggcacgccagtcgcgcgtgagcacgcggcagccggcggcacgttgatcgccggccaactgccgcagcccgacctcgacgccgcgcagttcctcgagagggcggcgcggtgccggcgtgcgagctaggcgcatctcggcgggcacatcc

SEQ ID NO: 200 - protein, 416 aa, Emiliania huxleyi
MVGGLLLLHAAAGVVLSSYLSKVPQGAADKILGIAQAFQRDERADKVNLVVGAYRDGGGSPWVLPTVREAEQRLIARGQNKEYASIVGVPAFLDRALEFAYGPGCTALSEGRVAAVQTLSGTGACRLAADFYARFLPPGTAAYVSEPTWPNHIPIFETAGLEVRKYRYLGADGRFDVEGMLEDIGQAPAGSVFVLHACAHNPTGVDPTAADWKRISDALLAAGQHILVDMAYQGFASGDARRDAAALSLLAEAGHSLALAQSFAKNFGLYGERVGSLSLVCADAAEASRVESQLKLLIRPMYSSPPIHGALLVNEVLSDAALRAQYDDECASMARRISDMRALLVAELSAAGSQRDWSHVTDQIGMFAYTGLTAAQCDALMEEHAVYLTRDGRISMAGVNEQNAGVIAAAIVAVAG

SEQ ID NO: 201 - DNA, 1376 bp, Phaedactylum tricornutum
ttctccatctcgctaacaatcatataatgaagtttgccctgcttgccgtgtgtgtcctttccattcacgtagcttgtgcgctctcgctcaagactccggcggccaccgcggcaacggcagcctccttatggaaagatctcgaagctggtccaccggacgctattctcggtatcgcccaggcctttcgggcctccaccgatccccgcaaggttaacgtgtgtgtgggtgcgtaccgggacgccgaaggtaatccttgggtacttccctccgttcgagcagccgaacaggtgttaatggcggacaacgacaacaaggagtacctgcctatcgaaggtgacgcggattttgtcaacaaggccctggcgtttgcctacggcgacgaaatggatgttcatcgcatagctggagtgcaaacgttgagtgggactggagcttgtcgaattgggggacagtttttgagcacctttttgcctggacggacgatttacattcccacacccacgtggggaaaccattggaaaatattcgctgaatgcggtttgcaagccgcaccataccgttactacaatcgtgccaccaacgcgctggatttggacggattgctggaggatttacaggaagccgaggacggctctattattctgctgcatgcctgtgcgcacaatcccaccggctgcgaccctacattgaaagattggcaacgcattgccgatgttttggaagaaaaatcgcatgtggtctttttcgattcggcgtatcagggctttgcctcgggcgacggcgaaaaggacgccgccgccttgcgctacgtggtgaagcgtgggttgcccgtcttactagcgcagtcgtttgccaaaaatttcggactctatggagaacgctgcgggaccctgtcggtggtttgtggagatgcggatcaaaaggaccgtatcctgtcgcaactaaagtgcatcattcgaccaatgtacagttccccaccgaaacacgggagtagcatcgtgaggacggtattgtcagacgagaagctgacatctcagtactacaaagaatgcgccaccatggcggatcgtattttggacatgcgcaccaagcttgtaaccaaattgtcggaagtaggctccaagcatgattggtcgcacgtgacgggccaaattggtatgtttgccttcaccggcatgtccaaagaaatgtgtgaccagctgacgaacgaatacgaaatctatttgacgaaagatgggcgtattagcattgcgggtttgaatgatcagaatctcgagtacgtggcgaaggctatccacgctgtcacagatggccagagcattactaccgcatgagcaattgaacccgtgtaataaataaattttggtaaataagtg

SEQ ID NO: 202 - protein, 435 aa, Phaedactylum tricornutum
MKFALLAVCVLSIHVACALSLKTPAATAATAASLWKDLEAGPPDAILGIAQAFRASTDPRKVNVCVGAYRDAEGNPWVLPSVRAAEQVLMADNDNKEYLPIEGDADFVNKALAFAYGDEMDVHRIAGVQTLSGTGACRIGGQFLSTFLPGRTIYIPTPTWGNHWKIFAECGLQAAPYRYYNRATNALDLDGLLEDLQEAEDGSIILLHACAHNPTGCDPTLKDWQRIADVLEEKSHVVFFDSAYQGFASGDGEKDAAALRYVVKRGLPVLLAQSFAKNFGLYGERCGTLSVVCGDADQKDRILSQLKCIIRPMYSSPPKHGSSIVRTVLSDEKLTSQYYKECATMADRILDMRTKLVTKLSEVGSKHDWSHVTGQIGMFAFTGMSKEMCDQLTNEYEIYLTKDGRISIAGLNDQNLEYVAKAIHAVTDGQSITTA

SEQ ID NO: 203 - DNA, 1322 bp, Phaedactylum tricornutum
ttcgaaaaatcagagcttcgattttcacaccgcaagcaaccatgctgaagcaaatctctcaatcgttccttcgtcccacagctcgatgtgtgtcagcgtcctcaagggttcgattcatgagcgccagtccctgggccgactatgaaatggcaccctttgaccccattatcggcctgaacgaggagtacagcaaagatgactttccacaaaaagtaatcgttggagttggtgcctaccgcgacggaaacggaaagccttatgtgcttccctgtgtccgggaagcagagaagaagatgatggagcagaacctcgacatggagtattcaggtatcgctggagatgccaagttcgtggaattagcactcaagtttggatacggcaaagactcgaaacctctaggagagaaccgcattcaaggtgtgcaggcactttctggtacaggcggcctccgcgttatgggggagctcctgcgtaaacacggccacacccatatttatgtgccgaatccaacgtggggcaatcacattcccattttcgtcaactctggattggaagttcgtaaatacaggtactatgatgccaagaactcggacctcgactttgacggtatgattaccgacatcaaggaaatgccgacggggagcactgtactactgcatgcctgcgcacacaacccaaccggtatggaccctactttggaacaatggaaagagctcagtgatataatcaaaacgaaaaagcttctgccattctttgattgtgcataccaagggtttgcttctggagatgccaacatcgacgctgcatcagtccggatgtttgtcgaagacggacaccttttagcaatggtccagtcgttttccaagaactttggtttgtatggtcatcgagtcggtacgctatcagttgttggcgagtccgaagcggaagccaagcgtgtgcaatctcagctcaaaaccgtaatccggcccatgtactccaaccctccgcgtcatggtgcacgtatcgtttcaactatcttgtcggaccccaagcttacccaagacttcctgattcaatgcaaggaaatggcagaccgaattcataccatgcgtggattgcttcgcagtaacttggagcaggctggctcgacacacaattgggagcacattactcgacagatcggtatgtttgcctacagtggcctttcgaaagaccaggtattggagatgcgtcacaagcaccatgtctactgtactgcggacggtcgaatttccatggcgggtgtaacttctggaaatgtggactacattgcgcaagccattcatgccgtttccaagtaa

SEQ ID NO: 204 - protein, 426 aa, Phaedactylum tricornutum
MLKQISQSFLRPTARCVSASSRVRFMSASPWADYEMAPFDPIIGLNEEYSKDDFPQKVIVGVGAYRDGNGKPYVLPCVREAEKKMMEQNLDMEYSGIAGDAKFVELALKFGYGKDSKPLGENRIQGVQALSGTGGLRVMGELLRKHGHTHIYVPNPTWGNHIPIFVNSGLEVRKYRYYDAKNSDLDFDGMITDIKEMPTGSTVLLHACAHNPTGMDPTLEQWKELSDIIKTKKLLPFFDCAYQGFASGDANIDAASVRMFVEDGHLLAMVQSFSKNFGLYGHRVGTLSVVGESEAEAKRVQSQLKTVIRPMYSNPPRHGARIVSTILSDPKLTQDFLIQCKEMADRIHTMRGLLRSNLEQAGSTHNWEHITRQIGMFAYSGLSKDQVLEMRHKHHVYCTADGRISMAGVTSGNVDYIAQAIHAVSK

SEQ ID NO: 205 - DNA, 1323 bp, Thalassiosira pseudonana
atgggtggctggtccaccactactgttcgtggttttgcaggtgctccttcaccttgggctgagttcccacaagctcccccggatccaattatcggattgactgaggcttatctaagcgatgactttccagaaaaggtcaatgttggagttggagcttatcgctgtgatcaaggaatgccgttcgtccttcccgtcgtacgtgaagcagagaatgaaatcaacttggaagaagttgatcacgaatactctggtattgccggatgccccaactttgtcaaccttgcattgcgtttttgctacggggaggacagtgttccgttgaaagagaagcgagtgtcaggtgttcaaactctttctggaacgggagggctacgtgtgtttggtgaagtgctacaccagttcggtcacaagcacatctacgtcccaaacccaacttggggtaatcacatcccaatatttacaaacgctggattggaagtacgaaaatatcggtactacgacaacgcaacatctagcttggactttgatcacttgattgaggatatgaaacaaatgccagatgggagctgcattctcttgcatgcatgtgctcacaatcccactggaatggatccaacgcctgagcaatggaaacaaatcagcaacgctgcaaaggagaagaatcttctaccattctttgattgtgcctaccagggatttgcttctggagatgctcgcaaagatgctgcagctgtgcgtatgtttgttgaagatggacacaaaattgctctcgtgcagtcgttctcaaagaactttggactgtatggtcaacgcatcggtgccttatccattgtcgccgattccccagaggaagcacaacgagtactaagtcagctcaaagttcatattcgtccgtcgtactctaaccctcctcgtcatggtgccagaatcgtcagcaagattctcgcaagcaaggagaagactgatcagtttgtaaaacagtgcatgggaatggcgaaacgtattgactcaatgaggagcaagctgaggacagcattggaggagcttggttctagcagagcatgggatcatatcacaaaacagattggcatgtttgcttacagtggcatgtccaaggatgaagtgattgaacttcgtgagaagcatcatatctactgcactttggatgggagaatcagtatggcaggtgttacgtcaaagaatgtggattacatcgctcgtgcaatctacgacgttacggagaagaagtgagggatagggttgagttgatgaaagagttgtcagtttgggttgcatgttaaacatctaaaaagatattacaac

SEQ ID NO: 206 - protein, 416 aa, Thalassiosira pseudonana
MGGWSTTTVRGFAGAPSPWAEFPQAPPDPIIGLTEAYLSDDFPEKVNVGVGAYRCDQGMPFVLPVVREAENEINLEEVDHEYSGIAGCPNFVNLALRFCYGEDSVPLKEKRVSGVQTLSGTGGLRVFGEVLHQFGHKHIYVPNPTWGNHIPIFTNAGLEVRKYRYYDNATSSLDFDHLIEDMKQMPDGSCILLHACAHNPTGMDPTPEQWKQISNAAKEKNLLPFFDCAYQGFASGDARKDAAAVRMFVEDGHKIALVQSFSKNFGLYGQRIGALSIVADSPEEAQRVLSQLKVHIRPSYSNPPRHGARIVSKILASKEKTDQFVKQCMGMAKRIDSMRSKLRTALEELGSSRAWDHITKQIGMFAYSGMSKDEVIELREKHHIYCTLDGRISMAGVTSKNVDYIARAIYDVTEKK

SEQ ID NO: 207 - protein, 4 aa, Artificial sequence
  ASPAT polypeptide motif 1
NPTG

SEQ ID NO: 208 - protein, 17 aa, Artificial sequence
  ASPAT polypeptide motif 2
IVLLHACAHNPTGVDPT

SEQ ID NO: 209 - protein, 17 aa, Artificial sequence
  ASPAT polypeptide motif 3
SRLLILCSPSNPTGSVY

SEQ ID NO: 210 - DNA, 50 bp, Artificial sequence
  primer 1
ggggacaagtttgtacaaaaaagcaggcttaaacaatggcgtcgtcgtcc

SEQ ID NO: 211 - DNA, 50 bp, Artificial sequence
  primer 2
ggggaccactttgtacaagaaagctgggtatgctaccatcattcacttca

SEQ ID NO: 212 - DNA, 56 bp, Artificial sequence
  primer 3
ggggacaagtttgtacaaaaaagcaggcttaaacaatggattccgtcttctctaac

SEQ ID NO: 213 - DNA, 50 bp, Artificial sequence
  primer 4
ggggaccactttgtacaagaaagctgggtaaaaatgtatggtcgctagtt

SEQ ID NO: 214 - DNA, 58 bp, Artificial sequence
  primer 5
ggggacaagtttgtacaaaaaagcaggcttaaacaatgaaaactactcatttctcttc

SEQ ID NO: 215 - DNA, 49 bp, Artificial sequence
  primer 6
ggggaccactttgtacaagaaagctgggttggtgttcagtttctcagac

SEQ ID NO: 216 - DNA, 56 bp, Artificial sequence
  primer 7
ggggacaagtttgtacaaaaaagcaggcttaaacaatggcttctttaatgttatct

SEQ ID NO: 217 - DNA, 50 bp, Artificial sequence
  primer 8
ggggaccactttgtacaagaaagctgggttgtcatctactgagatggaag

SEQ ID NO: 218 - DNA, 2194 bp, Oryza sativa
aatccgaaaagtttctgcaccgttttcaccccctaactaacaatatagggaacgtgtgctaaatataaaatgagaccttatatatgtagcgctgataactagaactatgcaagaaaaactcatccacctactttagtggcaatcgggctaaataaaaaagagtcgctacactagtttcgttttccttagtaattaagtgggaaaatgaaatcattattgcttagaatatacgttcacatctctgtcatgaagttaaattattcgaggtagccataattgtcatcaaactcttcttgaataaaaaaatctttctagctgaactcaatgggtaaagagagagattttttttaaaaaaatagaatgaagatattctgaacgtattggcaaagatttaaacatataattatataattttatagtttgtgcattcgtcatatcgcacatcattaaggacatgtcttactccatcccaatttttatttagtaattaaagacaattgacttatttttattatttatcttttttcgattagatgcaaggtacttacgcacacactttgtgctcatgtgcatgtgtgagtgcacctcctcaatacacgttcaactagcaacacatctctaatatcactcgcctatttaatacatttaggtagcaatatctgaattcaagcactccaccatcaccagaccacttttaataatatctaaaatacaaaaaataattttacagaatagcatgaaaagtatgaaacgaactatttaggtttttcacatacaaaaaaaaaaagaattttgctcgtgcgcgagcgccaatctcccatattgggcacacaggcaacaacagagtggctgcccacagaacaacccacaaaaaacgatgatctaacggaggacagcaagtccgcaacaaccttttaacagcaggctttgcggccaggagagaggaggagaggcaaagaaaaccaagcatcctccttctcccatctataaattcctccccccttttcccctctctatataggaggcatccaagccaagaagagggagagcaccaaggacacgcgactagcagaagccgagcgaccgccttctcgatccatatcttccggtcgagttcttggtcgatctcttccctcctccacctcctcctcacagggtatgtgcctcccttcggttgttcttggatttattgttctaggttgtgtagtacgggcgttgatgttaggaaaggggatctgtatctgtgatgattcctgttcttggatttgggatagaggggttcttgatgttgcatgttatcggttcggtttgattagtagtatggttttcaatcgtctggagagctctatggaaatgaaatggtttagggatcggaatcttgcgattttgtgagtaccttttgtttgaggtaaaatcagagcaccggtgattttgcttggtgtaataaagtacggttgtttggtcctcgattctggtagtgatgcttctcgatttgacgaagctatcctttgtttattccctattgaacaaaaataatccaactttgaagacggtcccgttgatgagattgaatgattgattcttaagcctgtccaaaatttcgcagctggcttgtttagatacagtagtccccatcacgaaattcatggaaacagttataatcctcaggaacaggggattccctgttcttccgatttgctttagtcccagaattttttttcccaaatatcttaaaaagtcactttctggttcagttcaatgaattgattgctacaaataatgcttttatagcgttatcctagctgtagttcagttaataggtaatacccctatagtttagtcaggagaagaacttatccgatttctgatctccatttttaattatatgaaatgaactgtagcataagcagtattcatttggattattttttttattagctctcaccccttcattattctgagctgaaagtctggcatgaactgtcctcaattttgttttcaaattcacatcgattatctatgcattatcctcttgtatctacctgtagaagtttctttttggttattccttgactgcttgattacagaaagaaatttatgaagctgtaatcgggatagttatactgcttgttcttatgattcatttcctttgtgcagttcttggtgtagcttgccactttcaccagcaaagttc

SEQ ID NO: 219 - DNA, 1179 bp, Oryza sativa
ttgcagttgtgaccaagtaagctgagcatgcccttaacttcacctagaaaaaagtatacttggcttaactgctagtaagacatttcagaactgagactggtgtacgcatttcatgcaagccattaccactttacctgacattttggacagagattagaaatagtttcgtactacctgcaagttgcaacttgaaaagtgaaatttgttccttgctaatatattggcgtgtaattcttttatgcgttagcgtaaaaagttgaaatttgggtcaagttactggtcagattaaccagtaactggttaaagttgaaagatggtcttttagtaatggagggagtactacactatcctcagctgatttaaatcttattccgtcggtggtgatttcgtcaatctcccaacttagtttttcaatatattcataggatagagtgtgcatatgtgtgtttatagggatgagtctacgcgccttatgaacacctacttttgtactgtatttgtcaatgaaaagaaaatcttaccaatgctgcgatgctgacaccaagaagaggcgatgaaaagtgcaacggatatcgtgccacgtcggttgccaagtcagcacagacccaatgggcctttcctacgtgtctcggccacagccagtcgtttaccgcacgttcacatgggcacgaactcgcgtcatcttcccacgcaaaacgacagatctgccctatctggtcccacccatcagtggcccacacctcccatgctgcattatttgcgactcccatcccgtcctccacgcccaaacaccgcacacgggtcgcgatagccacgacccaatcacacaacgccacgtcaccatatgttacgggcagccatgcgcagaagatcccgcgacgtcgctgtcccccgtgtcggttacgaaaaaatatcccaccacgtgtcgctttcacaggacaatatctcgaaggaaaaaaatcgtagcggaaaatccgaggcacgagctgcgattggctgggaggcgtccagcgtggtggggggcccacccccttatccttagcccgtggcgctcctcgctcctcgggtccgtgtataaataccctccggaactcactcttgctggtcaccaacacgaagtaaaaggacaccagaaacatagtacacttgagctcactccaaactcaaacactcacacca

SEQ ID NO: 220 - DNA, 1098 bp, Populus trichocarpa
atgaaggagaggcagcgttggagagctgaggaggacgctttactacgtgcatacgtgaaacaatatggtccaagggaatggaatcttgtatcacagcgcatgaacacacccctaaacagggatgctaaatcttgcttagaaaggtggaagaactacctcaaaccagggataaagaaaggatctcttacagaagaagagcagagtcttgtcattcggcttcaggcgaaacacgggaacaaatggaagaaaattgcagctgaagttccaggtcgaacagctaagagactaggcaagtggtgggaggtgttcaaagagaagcaacagagagagctgaaggaaaataacaagacagttgagccaattgacgagggcaagtacgataggattttagagacttttgctgagaagctagtgaaagagcgcccttctccagcatttgtaatggccacttcgaatgggacctttcttcatccccatccccatccccctccccatccccatccatctactccagcaccaactatgctccccccttggctttctaattctaacagcacctccactgtcaggccaccatccccctctgtaacgctaagcctctctccatcaacagttgcggcatcccctccaatcccatggcttcaacctgagagaggtccggaaaacactcctcttgttttgggcaatttgccacctcatggaatagtccctgtttgtggtgagagcttcttgatgtctgagttggtcgattgctgtagagaattggaagaagggcaccgcgcttgggctgcacacaaaaaggaggctgcctggaggctaagaagggtagagttacagctggagtcagagaggtcatgccgaaggagggagaaaatggaagagatagagtcaaagatcaagtctcttagggaagaagaaaaggcatctcttgataggattgaagcagagtacagggaacaattaacagggcttagaagggatgcagaaaccaaggaacagaaattgtccgaccagtggactgcaaagcatttgcgtcttactaagtttctcgaacagatgtcttgcagacctaggctttctgagcctaatagtcgttaa

SEQ ID NO: 221 - protein, 365 aa, Populus trichocarpa
MKERQRWRAEEDALLRAYVKQYGPREWNLVSQRMNTPLNRDAKSCLERWKNYLKPGIKKGSLTEEEQSLVIRLQAKHGNKWKKIAAEVPGRTAKRLGKWWEVFKEKQQRELKENNKTVEPIDEGKYDRILETFAEKLVKERPSPAFVMATSNGTFLHPHPHPPPHPHPSTPAPTMLPPWLSNSNSTSTVRPPSPSVTLSLSPSTVAASPPIPWLQPERGPENTPLVLGNLPPHGIVPVCGESFLMSELVDCCRELEEGHRAWAAHKKEAAWRLRRVELQLESERSCRRREKMEEIESKIKSLREEEKASLDRIEAEYREQLTGLRRDAETKEQKLSDQWTAKHLRLTKFLEQMSCRPRLSEPNSR

SEQ ID NO: 222 - DNA, 1497 bp, Antirrhinum majus
tttttacccgcgtgacaactttttactctcttttaatcagagtttcttgttctcagccttagagaaaaaaaagggctgttctttcatggtacagataattatgggctttggagaaaactttgtttcttgaatgtcagtataaatatgaaaattttggggcaatgggcaaaggtttttgcgagtggaaatgaaggaaaggcaacgatggagacctgaagaagacgccttgttgcgtgcttatgtaaaagaatacggccccagagattggcacctagtgacacaacgcatgaacaaacctctcaaccgggacgcgaaatcctgtttagaaaggtggaaaaactatttaaaacccggaatcaagaaagaatcccttacacaagaggagcagattctcgttattaatctacaagcgaaacacggcaacaagtggaaaaagatcgctgctgaagttccaggacgaactgccaaaagacttggtaagtggtgggaagtttttaaagagaagaagcaacgcgaagaaaaggacaacaagaagattaccgaaccgattgaagaaggaaaatacgatcgtatattggagacgtttgcagagaagatagtaaaagagcgagtcgtttcaagaattattacaatgccgccaacttcaaatagtggatttcttcaaaacgatccgtctccgcattctgcacaatcggtgttacccccatggctagctagttctagcatgacaacaaccattaggccacaatccccgtccgtgactttatccctctcgccctctgtagtgcctcctgccccagcaatcccctggctacaccctgataacaccactcatggtccgagcaatttgtcgtctcttggggtagttgcgccttttatgggagaaaaccatatagttcctgaacttttagagtgctgtcgggaattggaagaagggcagcgtgcatgggcggcgcacagaaaagaagcagcttggagactaaaaagggtagaactgcagttggaatcggagaaagcatgtcgaaggagagagaaaatggaggagattgaagcgaaaatgaaagctcttagagaagaacagaaggctagtctcgatcggatcgaagcagagtacagggaacaattagccggattgagaagagaagcggaagtgaaagaacagaagctggctgagcaatgggcggctaagcacttgcgtctaactaagtttctcgagcagacggggtataggtcgattgctggtgagctgaatggtcgataaaggcgttctgctttgttgttatgttggtctacttcttctataacagatatatggtatttgcttgagttaatttcttaggtcttgaatcaaccttggctagattgtttttgcttttcattatagatctgtgtgatctgtgtgatcttgatttggattttggtacacctttaaaggttggtttatgttattgagaatgtgatgaggaactatggttaaaatagagaataaaaaaaaaa

SEQ ID NO: 223 - protein, 357 aa, Antirrhinum majus
MKERQRWRPEEDALLRAYVKEYGPRDWHLVTQRMNKPLNRDAKSCLERWKNYLKPGIKKESLTQEEQILVINLQAKHGNKWKKIAAEVPGRTAKRLGKWWEVFKEKKQREEKDNKKITEPIEEGKYDRILETFAEKIVKERVVSRIITMPPTSNSGFLQNDPSPHSAQSVLPPWLASSSMTTTIRPQSPSVTLSLSPSVVPPAPAIPWLHPDNTTHGPSNLSSLGVVAPFMGENHIVPELLECCRELEEGQRAWAAHRKEAAWRLKRVELQLESEKACRRREKMEEIEAKMKALREEQKASLDRIEAEYREQLAGLRREAEVKEQKLAEQWAAKHLRLTKFLEQTGYRSIAGELNGR

SEQ ID NO: 224 - DNA, 1303 bp, Aquilegia formosa x Aquilegia pubescens
ggaaatgtattgcagaagaagagctgtgttgtttagttaagagaacttattagccatatacattatgaagaattcaaccgcatggactgtgatgtttgttattggaaatgaaggagaggcagcgctggagagctgaagaggacgcccttttacgtgcatatgtgaagcaatatggccctagggagtggaatcttgtgtctcagcgcatgaacacacctctcgatagagatgctaaatcttgcttagaaaggtggaagaattacctcaaaccagggatcaagaaaggttcactcacagaggaggagcagcgtcttgtcatccgtcttcaggctaagcacgggaacaagtggaaaaaaattgcagctgaagttccaggacgtaccgcaaagagactaggcaagtggtgggaagtgttcaaggagaagcaacaaagggagcagaaagagaacaacaaagccccagagccaattgaggagggaaagtacgacagtattcttgagacatttgctgagaagctagtaaaagagtgtccaaaccctcccttcttaatggctacatctaatggtggttttcttcactctgatccacctgcacccccgccaactatgcttcctccatggatggctagttcaaacggaacaactgtaaggccatcttctccgtcagttacattgaccctgtcaccttctacagtcactcctcccccaagcatcccatggcttcagtctgctgatagaggggcagcagaaaatccctctcttggcttaggcagtttgtcgtctcatgggtcaggttctactggtggagataaccatatggttgcagaccttgtggagtgttgcagagagttagaagagggacatcgagcttgggtagcacacaaaaaagaagcagcatggaggctgaagagggtggaactacaacttgagtcggagaaggcatgtcggaggagggataaaatggaggaaattgaatctaagataagggcccttagggatgaacagaaggtaacactggagaggattgaggcagagtatagagagcaattagcaggtctaaggagggatgctgacgctaaggagcagaagttagcagatcaatgggctgggaaacacatgcgtcttacaaaatttctggaacagatgggatgccgaccaaggcttattgaaccaaatggcagatgaatttgtttggtcctccaatagacgataactttgtagaatgcataactgttatgttgttcctctgatctgcatctctcatgaaactcctgcttgcttactggtgactaggttgtattctg

SEQ ID NO: 225 - protein, 358 aa, Aquilegia formosa x Aquilegia pubescens
MKERQRWRAEEDALLRAYVKQYGPREWNLVSQRMNTPLDRDAKSCLERWKNYLKPGIKKGSLTEEEQRLVIRLQAKHGNKWKKIAAEVPGRTAKRLGKWWEVFKEKQQREQKENNKAPEPIEEGKYDSILETFAEKLVKECPNPPFLMATSNGGFLHSDPPAPPPTMLPPWMASSNGTTVRPSSPSVTLTLSPSTVTPPPSIPWLQSADRGAAENPSLGLGSLSSHGSGSTGGDNHMVADLVECCRELEEGHRAWVAHKKEAAWRLKRVELQLESEKACRRRDKMEEIESKIRALRDEQKVTLERIEAEYREQLAGLRRDADAKEQKLADQWAGKHMRLTKFLEQMGCRPRLIEPNGR

SEQ ID NO: 226 - DNA, 1490 bp, Arabidopsis thaliana
ctggttttaaaagcctctctcactttggtcttttcgttttctctcttccattttctccaactatataaaaaaaaaaaagtgagagagagagcaaatctgtgtgatggaagttgctcttgagtttgggattatttatcttttcaatatcatttgatgaagaaggatggtgagatgggaagaagtgatgtcaggaggagtaggagatgaaagagagacaacgttggagtggtgaagaagatgcattgttacgtgcttacgttagacagttcggtccgagagaatggcatcttgtgtctgagcgtatgaacaaacctttgaaccgtgacgccaagtcttgtttagagagatggaagaattatcttaagccagggatcaagaaagggtctttgacagaggaagagcagaggcttgtgatccgtcttcaggagaaacacggcaacaagtggaagaagattgctgctgaggttcccgggaggacggcaaagcggttagggaagtggtgggaagtgtttaaggagaagcaacagagagaagagaaagagagtaacaagagagttgagcctattgacgagagtaagtacgatcggattctcgagagtttcgctgagaagcttgtcaaagagcggtctaacgttgtccctgctgctgccgctgctgcaacggttgtgatggctaattcgaatggagggtttttacattctgaacaacaagttcagcctcctaacccagtgatcccgccttggttagctacttctaacaatgggaacaatgttgttgcaaggcctccctcggtaactttgacattatcgccttccacagtggctgcagctgcgcctcaaccgccaatcccgtggctgcagcagcaacagcctgagagagcagagaacggtccagggggacttgtgttagggagtatgatgccgtcttgtagtgggagtagcgagagtgtgttcttgtcagagcttgtggagtgttgtagagagttggaggaagggcaccgagcttgggcagaccataagaaagaggctgcatggaggctaagaaggctggagctgcagctagagtcagagaagacgtgtagacaaagggagaagatggaggagattgaggcaaagatgaaagctcttagggaagagcagaagaacgcaatggagaagatcgaaggagagtacagagaacagctcgttggtttgaggcgagacgcagaggccaaagaccagaaactggctgatcaatggacctctaggcatatcagactcaccaagtttcttgaacaacaaatgggttgcagattagaccgcccctgaaccgtctcctaaactctttgttgtaacttgtaatgtaatgtaaggttttttttttgtttttttttgtttttttttgtctttgatcatttgggtgtctccaatgtttacttagacttttgggttccttacctcagctttgtatttgtttcttttacctttgtgttccatttatcacttcagttt

SEQ ID NO: 227 - protein, 367 aa, Arabidopsis thaliana
MKERQRWSGEEDALLRAYVRQFGPREWHLVSERMNKPLNRDAKSCLERWKNYLKPGIKKGSLTEEEQRLVIRLQEKHGNKWKKIAAEVPGRTAKRLGKWWEVFKEKQQREEKESNKRVEPIDESKYDRILESFAEKLVKERSNVVPAAAAAATVVMANSNGGFLHSEQQVQPPNPVIPPWLATSNNGNNVVARPPSVTLTLSPSTVAAAAPQPPIPWLQQQQPERAENGPGGLVLGSMMPSCSGSSESVFLSELVECCRELEEGHRAWADHKKEAAWRLRRLELQLESEKTCRQREKMEEIEAKMKALREEQKNAMEKIEGEYREQLVGLRRDAEAKDQKLADQWTSRHIRLTKFLEQQMGCRLDRP

SEQ ID NO: 228 - DNA, 1284 bp, Brassica napus
atgaaggagaggcaacgttggagtggtgaagaagatgcattgttacgtgcctacgtgagacagttcggtccgagagaatggcatctcgtctctgagcgtatgaacaagcctctgaaccgcgacgcaaagtcttgtctcgaacggtggaagaactatcttaagccagggatcaagaaagggtctttaaccgaggaagagcagaggctcgtgatccgtttgcaggagaaacacggcaacaagtggaagaagatcgccgcggaggttccagggaggacggcgaggcggttagggaagtggtgggaagtgttcaaggagaagcagcagagagaagagaaagagagtaacaagagagtcgagcctattgacgagagtaagtacgatcggatcctcgagagtttcgctgagaagcttgtgaaagagaggtcctctgttccttctgcggtgatggctagttcaaacggagggtttcaacaagctcctcctaataataataataataataataataataataataatcatgtgatccctccttggttagctacttctaacaacgggagcaatgttgttgcaagaccaccctcggtgactcttactctatcgccttcagtggctgcaacacctcctcaacagcagcctatcccatggctgcagcagcagcaacccgaggctagtccgggaggtctagtgttagggagtatgataccgtcttgtagcggtagtaatgagagtgtgttcatgtcagagctagtggagtgttgtagagagctggaggaagggcacagagcttgggcggagcataagaaggaggcggcttggaggctaaggagattagagctgcagctagagtcagagaagacaagtagacaaagggagaagacagaggagattgaggcaaagatgaaggctctgagggaagagcagaagatggcaatggagaagattgaaggagagtatagggaacagcttgttgggttgaggagagatgctgaggccaaggatcagaaactagctgatcagtggacctctaagcatatcaggctcaccaagtttcttgaacaacacatgggctgcaggcagagactattagaccggccttgacacatgaaccaaaccaccaaacacctactatgatctcttctcctctttgttgtgtaatgtaatgtaagctttttgtttttattttcatcatttggtgtctccaatgttaatcagacttttgggttccttaactcagcttttaatgtatgtgttggtttctcttctttgaaaaaaaaaaaaaaa

SEQ ID NO: 229 - protein, 366 aa, Brassica napus
MKERQRWSGEEDALLRAYVRQFGPREWHLVSERMNKPLNRDAKSCLERWKNYLKPGIKKGSLTEEEQRLVIRLQEKHGNKWKKIAAEVPGRTARRLGKWWEVFKEKQQREEKESNKRVEPIDESKYDRILESFAEKLVKERSSVPSAVMASSNGGFQQAPPNNNNNNNNNNNNHVIPPWLATSNNGSNVVARPPSVTLTLSPSVAATPPQQQPIPWLQQQQPEASPGGLVLGSMIPSCSGSNESVFMSELVECCRELEEGHRAWAEHKKEAAWRLRRLELQLESEKTSRQREKTEEIEAKMKALREEQKMAMEKIEGEYREQLVGLRRDAEAKDQKLADQWTSKHIRLTKFLEQHMGCRQRLLDRP

SEQ ID NO: 230 - DNA, 1259 bp, Cardamine hirsute
gcattttcgcacaactaaaaaaaaaatagagcaaatctgcgtcatggaagttgctctccagtctttgatcacttcccttttcaacataatttgatgaagaaggatggtgagatgggaagaagtgatgttgttgttaggaggagatgaaagagagacaacgttggagtggtgaagaagatgcattgttacgtgcttacgtaagacagttcggtcctagagaatggcatcttgtctccgagcgtatgaacaaacctttaaaccgtgacgccaaatcttgtttagaaagatggaagaactatcttaaaccagggatcaagaaaggttctttaacagaggaagaacagagactcgtgatccgtcttcaagagaaacacggcaacaagtggaagaaaatcgccgctgaggttcccggaagaacagctaaacggttagggaagtggtgggaagtgtttaaagagaagcaacaaagagaagagaaagagagtaataaaagagttgagcctatcgacgagagcaagtacgataggattcttgagagtttcgctgagaagcttgttaaagaacggtctaataatattgttgttgttcctccttctgctgggaaggttgtgatggctaattcaaacggagggtttctacaacatagtgagcagactcagcctcagcctcctaatccggtgattccaccttggttagctacttctaacaatgggaacaatgttgttgtcagacctccttctgttactttaactttatcaccttctactttggctgcttctacgcctcctccaccgcaaatcccgtggcttcagcaacaacagcagcctgagagaggagagaatggtcttgtgttagggagtatgatgccttcttgtagtggtagtagtagtagtgagagtgtgttcttgtctgagcttgtggagtgttgtagagagttggaggaagggcatagagtttggtcggagcataagaaagaagctgcgtggagactaaggaggttggagttgcagttagagtcagagaagacgtgtagacaaagggagaagatggaagagattgaagcaaagatgaaagctcttagggaagagcagaagattgcaatggagaagattgatggtgagtatagagaacagcttgttggtttgagaagagatgctgaagctaaagaccagaaacttgctgatcaatggacttctaaacatattagactcactaagtttcttgaacaaaacatgggttgcagattagaccgcccctga

SEQ ID NO: 231 - protein, 371 aa, Cardamine hirsute
MKERQRWSGEEDALLRAYVRQFGPREWHLVSERMNKPLNRDAKSCLERWKNYLKPGIKKGSLTEEEQRLVIRLQEKHGNKWKKIAAEVPGRTAKRLGKWWEVFKEKQQREEKESNKRVEPIDESKYDRILESFAEKLVKERSNNIVVVPPSAGKVVMANSNGGFLQHSEQTQPQPPNPVIPPWLATSNNGNNVVVRPPSVTLTLSPSTLAASTPPPPQIPWLQQQQQPERGENGLVLGSMMPSCSGSSSSESVFLSELVECCRELEEGHRVWSEHKKEAAWRLRRLELQLESEKTCRQREKMEEIEAKMKALREEQKIAMEKIDGEYREQLVGLRRDAEAKDQKLADQWTSKHIRLTKFLEQNMGCRLDRP

SEQ ID NO: 232 - DNA, 1471 bp, Eschscholzia californica subsp. Californica
aattagccatatgggttcttcatcgagtaccattttcgtgttaatccgtagtcgaagtaattactcacattttcacatatccttagatacagtatgaaggatttgaggcaatgggctattgtttttgctgctggaaatgaaagagagacagcgttggagagctgaagaagacgccttattacgcgcgtacgtgaaacagtatggcccaagagaatggaaccttgtttctcagcgcatgaacacacatcttgatagagacgcaaaatcgtgcttagagaggtggaagaattacctaaaaccaggcatcaagaaaggatctttgactgaggaagaacaacgacttgtaatccgtcttcaagccaaacacggtaacaagtggaagaaaattgcagctgaagttccggggcgaacggcaaagagattaggcaagtggtgggaagtgtttaaagagaagcaacaaagggagcaaaaagaaacatccaaaactattgatccaattgaagaaggaaagtacgatcaaattctcgaaacgtttgcagagaaattggtgaaagaacgaccaaatcctccattatacatgggaacctctaatgggggttatcttcagtctaatgcagctactgttccaccaccaacactacttccaccttggctttctagttctagtgccccacccacaacttcctcacctccttcggttacattaactctctcgccttctacaattgctccgtgtacttcaatgtcctggttgcagcctgataggggcggaaacgatagcaacccctctcttgtattgggtaattttccgccaacacatgttccggttcctccaagtggaggagatagattaatggttccggatcttgtagagtgctgtagggagttggaagaaagtcatagagctttggtagctcataagaaagaagcagcttggaggcttaaaagggttgaactacaactcgagtcagagaaagcatgtcggaggagagagaaaatggaagagatagagatgaaggtgagagcacttagagaagaacagaaggtgacacttgatagaatggaagccgactatcgggatcagctggctggtttaagaagggatgctgaagctaaggagcagaaactggctgatcaatgggcggcaaagcatttgcgcctaatgaagtttctagaacagatagggtgccgaccgccaagtgaacccagtggaaggtgagagtttctctatatctaagagacgtcttcgaagttaactactataacatatggtgattgtgcatattttgtcctggtgtatttgtgttagataactacttatctgttgttttattggctttttgtactccttttatgttaggattgagctaagtagaactagaacttgagttttagggtttgtaagattttcagttctcctaaataatctttgcatgtatctttaagagcagaaatttcctactttcggttt

SEQ ID NO: 233 - protein, 360 aa, Eschscholzia californica subsp. Californica
MKERQRWRAEEDALLRAYVKQYGPREWNLVSQRMNTHLDRDAKSCLERWKNYLKPGIKKGSLTEEEQRLVIRLQAKHGNKWKKIAAEVPGRTAKRLGKWWEVFKEKQQREQKETSKTIDPIEEGKYDQILETFAEKLVKERPNPPLYMGTSNGGYLQSNAATVPPPTLLPPWLSSSSAPPTTSSPPSVTLTLSPSTIAPCTSMSWLQPDRGGNDSNPSLVLGNFPPTHVPVPPSGGDRLMVPDLVECCRELEESHRALVAHKKEAAWRLKRVELQLESEKACRRREKMEEIEMKVRALREEQKVTLDRMEADYRDQLAGLRRDAEAKEQKLADQWAAKHLRLMKFLEQIGCRPPSEPSGR

SEQ ID NO: 234 - DNA, 1566 bp, Eucalyptus grandis
tatctctagcttagcttggagcttacctactgtactctgcttttcccccccctctctctctctctctcgctctgaacgtttttcagtcatcgagccgagctgaactcctctccccctctctctctctctctctgggtgacccttcttcccttttctctgcgcttccgtcgaagtgaaagagggcgccgaggttgtcgtccgagatgcgtcggagaaggacctctctcctgatttcatgagaccgaccaccacactatgaaagatctaagtttgaggcaatgggaagtggtgtctacacctggcaatgaaggaaagacagcgttggagagctgaagaggacgccttgttacgtgcatatgtgaaacagtatggcccaagggagtggcaccttgtgtctcagcgcatgaacactccccttaaccgtgatgccaagtcctgcttagagaggtggaagaactacctgaaaccaggtataaagaagggatccctcagtgaggaagaacagcgtcttgtcatccagcttcaggcgaaacacggcaacaaatggaagaaaattgctgctgagatcccgggccgtacggctaagagattggggaagtggtgggaggtatttaaagagaaacagcaaagggagcaaaaggagaacaaaggtgctttaccaattgacgaggggaaatacgatcatatattagaaaacttcgccgagaagctagtgaaggagcgatcgaccccagcacttctcatggccacagcaaatggtggcttcattcacaccgattcacctgctcttgctccaactcttctacctccatggctttcaaattctaatggcaccccaactctgaggcctccttcaccgtcagtaacccttagtctctcccctgcaacagttccagcatctcaaccgattccgtggctgcaggcagatagaggactcgatagtggttctctctcactgactggtttgcccaaccatggtccactccctacttcaggagaaaatatcttaatgtctgagcttgcagagtgctgcaaggaattggaagaagggcaccgtgcttgggctgcacacaagaaggaagcggcatggaggttgaaacgactggagttgcagttggagtcggagaaggcgtgcaggaggagggagaaaatggaagagatagaggcgaaaatcaacactctcagggaagagcagaaagcttctttggataagattgaaacagaatacagagagcagctggcaggattgaggaaagatgcagaatccaaggagcagaagctggctgaacagtggacggcgaagcatgttcagctctctaagttaatcgagcaaatcgggtttagaccccggattgcagatcatgacaggcagtgagagttaccgtgagtcgtagtcctttatatacacgtctctttcttgtgccaatcatgtcattcaagtctgcttattagaattccaagactcccttttcctacccaacaaacacctacctttacgtatatctcaataacattacagagcttctcatcctcagctaagtcctctgagacattttgtatggaaat

SEQ ID NO: 235 - protein, 356 aa, Eucalyptus grandis
MKERQRWRAEEDALLRAYVKQYGPREWHLVSQRMNTPLNRDAKSCLERWKNYLKPGIKKGSLSEEEQRLVIQLQAKHGNKWKKIAAEIPGRTAKRLGKWWEVFKEKQQREQKENKGALPIDEGKYDHILENFAEKLVKERSTPALLMATANGGFIHTDSPALAPTLLPPWLSNSNGTPTLRPPSPSVTLSLSPATVPASQPIPWLQADRGLDSGSLSLTGLPNHGPLPTSGENILMSELAECCKELEEGHRAWAAHKKEAAWRLKRLELQLESEKACRRREKMEEIEAKINTLREEQKASLDKIETEYREQLAGLRKDAESKEQKLAEQWTAKHVQLSKLIEQIGFRPRIADHDRQ

SEQ ID NO: 236 - DNA, 1242 bp, Glycine max
tcttggaaatgaaagataggcaacgttggagagctgaagaggatgctttacttcgtgcatatgtcaaacagtatggtcctagggaatggaatctcgtgtctcagcgcatgaacacacctcttaacagggatgccaagtcatgcttagaaaggtggaagaactacctcaaacccggcattaaaaaaggatctcttactgaggaagagcagcgtctagtcatcaatcttcaagcaacgcacgggaacaagtggaagaaaattgcagcacaagtccctggtcgcactgcgaagaggttagggaagtggtgggaggtatttaaggagaagcagcaaagggaaaccaaggggaatagctgcactattgacccaattagcgatagcaagtacgagcatatccttgagagttttgcagagaagctagtgaaagaaaggccttcaacatcaacatcaacatcatttgttatggctacttccaacagttcttttctgcatgctgatgcaccggctcctgcaccagccttgcttccgtcttggctttccaattccaatggcactgcacctgtgaggccaccctccccttctgtgactcttagtctttctccctcgacagtggcagcgcctcctccatggatgcagccccccgtcagaggacaggacaatgctagtcctcttgttttggggaatgtggcgcctcacggggccgttctagcatttggtgagaacatggtgatgtctgagctagtggagtgctgcaaggagttggatgaagtgcatcatgctttggccgggcataagaaggaggcagcatggcggttaagcagggtggagctgcagttggagtctgagaaggctgggcgaaggagggagaagatggaggaaatcgaagcgaaaatcaaagctctgagggaggagcaaacggctgcattggatagaattgaagcagaatatagggagcagttggcagggctgagaagagatgctgaaagcaaggagcaaaagttggctgaacaatgggctgcaaaacacttgcgacttactaagtttctagaacaggtagggtgcagatcaaggctcactgaaccaaatggaagatagagtgacatcaatcattcacaaattgggaaaatctagtttgcttttacttattattatgtcttgaatttatatgatatgaactttatagtcatagtagttttgttcctgtcatttttctaaaatatgttgttacaaaaaaaaaaaaaaa

SEQ ID NO: 237 - protein, 361 aa, Glycine max
MKDRQRWRAEEDALLRAYVKQYGPREWNLVSQRMNTPLNRDAKSCLERWKNYLKPGIKKGSLTEEEQRLVINLQATHGNKWKKIAAQVPGRTAKRLGKWWEVFKEKQQRETKGNSCTIDPISDSKYEHILESFAEKLVKERPSTSTSTSFVMATSNSSFLHADAPAPAPALLPSWLSNSNGTAPVRPPSPSVTLSLSPSTVAAPPPWMQPPVRGQDNASPLVLGNVAPHGAVLAFGENMVMSELVECCKELDEVHHALAGHKKEAAWRLSRVELQLESEKAGRRREKMEEIEAKIKALREEQTAALDRIEAEYREQLAGLRRDAESKEQKLAEQWAAKHLRLTKFLEQVGCRSRLTEPNGR

SEQ ID NO: 238 - DNA, 1300 bp, Glycine max
tcttggaaatgaaagagaggcaacgttggagagctgaagaggatgctttattacgttcttatgtcaaacagtatggtcctagggaatggaatcttgtgtctcagcgcatgaacacatatcttaacagggatgctaagtcgtgcttggagaggtggaagaactacctcaagcctggcatcaaaaaaggctctcttactgaagaagagcagcgccttgtcatccaccttcaagcaaaatatggaaacaaatggaagaaaatcgctgctgaagtcccagggcgcactgctaagcggttaggcaagtggtgggaagtcttcaaagagaagcagcagagagagaaaaaggagatcaatagaattgccgacccaattaacaatagtaagtacgagcacatactcgagagttttgcagagaaactagttaaggaacgcccttcaccatcatttgtcatggctgcttccgatggggcatttctgctcactgatacaccagcacctgcatcttccttgcgtccttcttggctttccaattctagtagtgctgcagccatcggcccaagttccctttctgtgaaactaagtctttcttcctcaacggtggccacacctccattttcatggttgccacccgagagaggaccagacaatgctccttttgttttggggaatgtatcagcgcttcatggagctattccaactctaagtgatagcatgcatatgtctcagatggtggagcactgtaaagagttggaagaggggcatcgtgctttggccacgcacaagaaggaggcagcttggaggttaagtcgggtggagttacagttggagtcagagaaggccaaccgaagaagggagaagattgaagaatttgaagcaaagattaaagctcttcaggaagaggagaaagctgctttaggtagaattgaagcagaatacagagaacagttagctgcattgaggagagatgctgaaaacaaggagcaaaagttggcagaacaatgggatgcaaagcatttacggtttactaggttactagagcaattaggatgcagagcagggctccttgagccaaatgcaagatgaagatatattttggcaaaatggatattggtgctcttctgactaaaattatatgcagtttgtgatcttggtatatttttattttagacgtgtatgaatttcctatctattcatacaacttgagtaacttccgttaacagttgaattacctgcatatggtatcacatccgagtttataaacttagttatattcctgaaaaaaaaaaaaaaaaaaaaaaaaa

SEQ ID NO: 239 - protein, 357 aa, Glycine max
MKERQRWRAEEDALLRSYVKQYGPREWNLVSQRMNTYLNRDAKSCLERWKNYLKPGIKKGSLTEEEQRLVIHLQAKYGNKWKKIAAEVPGRTAKRLGKWWEVFKEKQQREKKEINRIADPINNSKYEHILESFAEKLVKERPSPSFVMAASDGAFLLTDTPAPASSLRPSWLSNSSSAAAIGPSSLSVKLSLSSSTVATPPFSWLPPERGPDNAPFVLGNVSALHGAIPTLSDSMHMSQMVEHCKELEEGHRALATHKKEAAWRLSRVELQLESEKANRRREKIEEFEAKIKALQEEEKAALGRIEAEYREQLAALRRDAENKEQKLAEQWDAKHLRFTRLLEQLGCRAGLLEPNAR

SEQ ID NO: 240 - DNA, 1437 bp, Gossypium hirsutum
atccatccccctttgtttgagagagagtttgtgtgttttggttgtttggactgtcggctttgattttatgttctccttaatcctttgctgttcttgtcggagattgtaagcttgaagatgcaaccaacacaaagtttaaatttgggcacttgaactcaaagaaaatatgatacattatgaggatcacagagcaatgggaagtggtgttttcccctggaaatgaaggagagacagcggtggagagctgaagaagacgctttgttgtgtgcatacgtaaaacaatatggtccgagggagtggaaccttgtgtcacaccgcatgaacacacccctgaacagggatgcaaaatcttgcttagagaggtggaataactatctcaaacctggtatcaagaagggatcccttacggaagaagagcaacgtcttgtaatccgtcttcaagctaaacacggcaacaaatggaagaaaattgcagctgaagtccctggtagaacagctaaaagactgggcaagtggtgggaggtattcaaggagaagcaacaaagggaacataaagagaagcataagacggttgagccagtcgaggaaggcaagtacgataggatattagaaacttttgctgaaaaactagtaaaacagggccatagctcagcctttcccatggctgcttctaacgggggttttcttcatactgacccaccttcacctgcaccaccaactttacttccaccttggctttctaattccagcaatgcgtccgttgtcacaccaccttccccttctgtgactttaagcttatctccctcaacggtggcagctgctcccccaatcccgtggctgcaacctgagaggatgtccgaaactagccctgttttgggaaacagggtgccccatggatcatttcctcgtagtgagaacctgctgatatctgaattgatggactgctgcagacagctggaagatgggcgccgcgcttgggttgcacatagaaaggaagcggcctggaggttaagaagggtagagttacaactcgaatcagaaaaggcttcccgtaaaaggaagaagatggaagaaatagagtcaaagatcgaggctctaagggaagagcagaagagtacacttgatagaatcgaagctgaatatagggaacaactggaggggctaagaagagatgcggaagcgaaggagcaaaaattagcggagcaatgggctgcaaagcatttgcatctgaccaagtttcttgaacaaacggggtgcagacccagggttgtggagcctaatgggcagtgagcaaagatgatttatcaagcgtctcctttcaacagactctgcattgtttttgatgatattctctactatagaagtctatttatagttggtttttctaggatgggacactctgaatgggaaaggtagcattagccctatctttgtgtt

SEQ ID NO: 241 - protein, 356 aa, Gossypium hirsutum
MKERQRWRAEEDALLCAYVKQYGPREWNLVSHRMNTPLNRDAKSCLERWNNYLKPGIKKGSLTEEEQRLVIRLQAKHGNKWKKIAAEVPGRTAKRLGKWWEVFKEKQQREHKEKHKTVEPVEEGKYDRILETFAEKLVKQGHSSAFPMAASNGGFLHTDPPSPAPPTLLPPWLSNSSNASVVTPPSPSVTLSLSPSTVAAAPPIPWLQPERMSETSPVLGNRVPHGSFPRSENLLISELMDCCRQLEDGRRAWVAHRKEAAWRLRRVELQLESEKASRKRKKMEEIESKIEALREEQKSTLDRIEAEYREQLEGLRRDAEAKEQKLAEQWAAKHLHLTKFLEQTGCRPRVVEPNGQ

SEQ ID NO: 242 - DNA, 1424 bp, Lotus corniculatus
gatttgctcttggaaatgaaggagaggcaacgttggacatctgaggaggatgctctattatgtgcttatgtcaaacagtatggtcctagagaatggcatctcgtgtctcagcgcatgaacacgactcttcacagggatgcaaagtcgtgtttagaaaggtggaagaactacctgaagcccggaatcaagaaaggatctctcacggaggaagagcagcgccttgtcatccgccttcaagcaaaacacggcaataagtggaagaaaattgctgcagaagtcccaggtcgaaccgctaagaggctaggcaagtggtgggaggtatttaaggagaaacagcagagagaaaaacaggagattagcaagtcaatcggcccggttgatgacagcaaatacgatcacattctcgagactttcgcggagaagctagtgaaagagcatccttcaccatcatatctcatggctgcttctaatggaccctttctccacactgacacacctgctgccacccctgcatcagctttgctccctccttggctttcaaattcgagcaacaatccagccacagctgggcagccaccttccccttccgtgacattaagcctctccccctcgacagtggcaggaccaccacctccatggagaggactggagaataatgctcttgctatggcgaacacagcgccccacggaactgttcctgctttcagcgataacatgctggtatctgagttagtggactgctgtaaggagttggaagaagtgcacggcgcgttggccgcacataagaaggaggcgacctggaggctgagaagggtggagctgcagttggagtcagagaaggcgaatagaaggagggagaagattgaagaaacggaagctaagattaaagctctcagggaacaacagaatgctgctttggaaagaattgaagcagagtatagagaacagttagctggattgaggagagatgcagaaaccaaagaacaaaagctggctgagcaatggactgtaaagcactcgcgccttatgaagtttatggagcagataggatgcagatcccggattgcagagactaatggaagatgaagacatcactcagaatcgatatctggttggggtgctgttctggcttgaatcatatatgcagtcactcacatattaagttttgatcttgtgcctaacctccagttttacaaatgtctgttattgcaacttgaggaatttgtattagaattagttgatgagttgcatccatctttatgaatatgaactgagttataagtttatgtagcttatttctgtcttatgttccatttccattgggatctcgaatgacatttgtacaaactgcaaagggatgttgttagcccggacttttagtttggaagtgttcttatgattaaaaaaaaaaaaaaaaaaaaaaa

SEQ ID NO: 243 - protein, 356 aa, Lotus corniculatus
MKERQRWTSEEDALLCAYVKQYGPREWHLVSQRMNTTLHRDAKSCLERWKNYLKPGIKKGSLTEEEQRLVIRLQAKHGNKWKKIAAEVPGRTAKRLGKWWEVFKEKQQREKQEISKSIGPVDDSKYDHILETFAEKLVKEHPSPSYLMAASNGPFLHTDTPAATPASALLPPWLSNSSNNPATAGQPPSPSVTLSLSPSTVAGPPPPWRGLENNALAMANTAPHGTVPAFSDNMLVSELVDCCKELEEVHGALAAHKKEATWRLRRVELQLESEKANRRREKIEETEAKIKALREQQNAALERIEAEYREQLAGLRRDAETKEQKLAEQWTVKHSRLMKFMEQIGCRSRIAETNGR

SEQ ID NO: 244 - DNA, 1218 bp, Lotus corniculatus
aatttgctcttggaaatgaaggagaggcaacgttggtcatctgaggaggatgctttactacatgcttatgtccaacaatatggtcctagggaatggaatctcgtgtctcagcgcatgaacacacctctcaatagggatacaaagtcatgcttagaaaggtggaagaactacctcaagcctggcattaaaaagggatctcttaccaaagaagagcagcgtcttgtgatcctccttcaagcaaattacggaaacaaatggaagaagatcgccgctgaagtccccggtcgcacggcgaagcgattagggaagtggtgggaagtctacaaagagaagcagcagagagaaaaaattgagatcaatgggatagttagcccaattagtgataccaagtatgaacatatgctagagggttttgctgagaaactagtgaaagagcacactttaccatcatttgctatggctgcatcatccaatgaggcatttctgcataccaattcatcagctatgcttccttcttggctttccaattatgattcaacttcaacacctccaagttctatttccgtgacgttgagcctttctccctcaacagtggcaacacctagaggactagagaacaatgctccttttgttttgaggaatgtaacagcacacaatggatctgttccttctttcagtgatcacattctcatgtcagaattggtgggattctccaaagagttggaagaggggcaccgcgctttggcggcacataagaaggaggcagagtggagactaagaaggttggagttgcagttggagtcggagaaggcgtgtcgaagaagggagaccgtggaagagtttgaggcgaatattaaagctcttcaagaagagcagacagctgctttgaatagaattgaaaatgcatgcagggaacagttaggtggattgaggagagatgctgagagcaaggagcaaaaattggcagagaaatggacttcaaagcatttgaggcttactaggttattagagcaaatgaaaatccagaccggggctccttgagccaaatgcaagatgaagatatgatcagcaaattggatataggtgctcttatgacttgaattatatgcactttatgttccttgttgtgatcctgatatatttattcacagatttgtgcaaatttcctatctattcatacaagtttgagtaaaaaaaaaaaaaaaaaaaaaaaaaaaa

SEQ ID NO: 245 - protein, 341 aa, Lotus corniculatus
MKERQRWSSEEDALLHAYVQQYGPREWNLVSQRMNTPLNRDTKSCLERWKNYLKPGIKKGSLTKEEQRLVILLQANYGNKWKKIAAEVPGRTAKRLGKWWEVYKEKQQREKIEINGIVSPISDTKYEHMLEGFAEKLVKEHTLPSFAMAASSNEAFLHTNSSAMLPSWLSNYDSTSTPPSSISVTLSLSPSTVATPRGLENNAPFVLRNVTAHNGSVPSFSDHILMSELVGFSKELEEGHRALAAHKKEAEWRLRRLELQLESEKACRRRETVEEFEANIKALQEEQTAALNRIENACREQLGGLRRDAESKEQKLAEKWTSKHLRLTRLLEQMKIQTGAP

SEQ ID NO: 246 - DNA, 1355 bp, Lycopersicon esculentum
aattcgattattttcttgaaatataataaaaaagatcatatgggtcgagctagaaactgggatgcctaagttgtttcttgaaaattatgaggagtttgggaggatggaaactggtgtttacacctggaaatgagggagaggcaacggtggcgagctgaagaggatgctttgttgcgggcatacgtgagacagtatggaccaaaagaatggccccttgtatcacagcgtatgaacacgccccttaacagggacgcgaagtcttgtttagaaaggtggaaaaactacctcaaaccagggattaaaaaaggatcactcactgaagacgagcagcgtcttgttatacaactacaagccaaacacggtaacaaatggaagaaaatagcagctgaagtaccaggtcgaactgctaaaagattaggaaagtggtgggaagttttcaaagagaagcaacagagagagcagaaagaaaacaacaaggttgttgatccagtagacgagggaaaatacgatcacattctcgaaacctttgcagaaaagattgtgaaagaaaggagtgtcccaggtttacttatggctacttctaatggaggtttcctccacgccgatgcctcaactcctacgccacaaactcttcttcctccgtggctttctaattcttctgctccttcaactgttagatcatcatctccatctgtgactttaagtctctccccctctactgtgccgcctacacctacacctggcattccgtggctacagacagatagaggacctgataatgcgcctctcatcttgagcagttttccacatcatagtgttgctccttgtggagaaaatccttttattactgaacttgcggaatgctgcaaggatttagacgaagggcatcgtacttggactgcacataagaaggaagcagcttggaggttaaggagggttgaattgcaactagaatctgaaaaagcaagcaaagttagggagaaaatggaggaaattgaagcaaaaatgaaagcgctgagggaagaacagaaagcaactctagacagaattgaagcagaatacaaggagcaactagcaggcttgaggagggatgcagaagcaaaagagcagaaattggcagagcaatggacatccaaacacatgcgccttgctaagtttcttgagcagatgggatgccaatcaagacttgctgaacctaatggcggccgctaaagcaaagcttgcaagctaagccaagaattcttttgtgtttccttgctcctttagacggttctttctacttgccgcgacttttcttactgtaaactttttgtttgatcatcttctatttggttttctaaatcactagtgaattc

SEQ ID NO: 247 - protein, 360 aa, Lycopersicon esculentum
MRERQRWRAEEDALLRAYVRQYGPKEWPLVSQRMNTPLNRDAKSCLERWKNYLKPGIKKGSLTEDEQRLVIQLQAKHGNKWKKIAAEVPGRTAKRLGKWWEVFKEKQQREQKENNKVVDPVDEGKYDHILETFAEKIVKERSVPGLLMATSNGGFLHADASTPTPQTLLPPWLSNSSAPSTVRSSSPSVTLSLSPSTVPPTPTPGIPWLQTDRGPDNAPLILSSFPHHSVAPCGENPFITELAECCKDLDEGHRTWTAHKKEAAWRLRRVELQLESEKASKVREKMEEIEAKMKALREEQKATLDRIEAEYKEQLAGLRRDAEAKEQKLAEQWTSKHMRLAKFLEQMGCQSRLAEPNGGR

SEQ ID NO: 248 - DNA, 1420 bp, Malus x domestica
agttttgggcggagatgcgtcgtggacgaaggttggttccgtcgtacacttaagcagatattaggagatcgactaatataatggcgtctggatcccagatacattatgaagagtttcggtttgaggcaatggacaattgtgcgtgctcctggagatgaaggagagacagcgttggagtgctgaagaggacgctttgttacgtgcatatgtgaagcaatatggaccaagggagtggaaccttgtatcgcagcgcatgaacacacccctagacagggatgctaaatcttgcttagaaaggtggaagaattatctcaaacccggtattaagaaaggatccctaactgaagaggagcagcgccttgtcatttgtcttcaagccaaacacggtaataagtggaagaaaattgctgctgaagtccctggtcgtacggctaagagattgggaaagtggtgggaagtgttcaaagagaagcagcaaagagaacagaagaacaagaagataactgaccctattgtggagggtaaatacgatacaatacttgaaacttttgccgagaagttggtgaaggagcgtgcgccaacctatctcatggctacttcaaacggggcctatcttcatacggaaacatcttctccagcgccaacgattcttcctccttggctttctaattccaatgtgtcccccaatgtgaggccaccatctccttctgttaccctgagtctgtccccgacagtggcaccctctccgccaatcccttggctgcagcaggatcgaggatcagatggtagttttgttgtgggaaatttgccacatcatggtgtagttcccgcttgtggggagaacctagtgatatctgagttggtggagtgctccagagagttggaggaaatgcaccgtgcttgggcagcgcataagaaggaagcttcgtggaggttaagaagggtggagttgcaactggattcggagaaggcttgtcggaggagggagaagatggaagagattgaagccaaggtgaaggctctaagggaagagcagaaggctgctctagacaggatcgaagcagaatacagggaacagttagcagggctaaggagggatgcagaagcaaaggagcagaagttggctgagcaatgggccgcgaagcatttgcgtctctcccagtttctcgagcagatgggaggcagaccaaggattgttgagcctaacggccggtgagaaatatgtgttttacatggtcattgtagacgcatgaggtccgaatttctatttctatttctgttttctgctttgtttcttttcttgcttttgatctcgtgtgcattctgatctgaaatgctgtcataggtgttttattacgtataccgtctggctattggcctggaccgaatgactgtattatcttttcgcaaaaaaaaaaaa

SEQ ID NO: 249 - protein, 353 aa, Malus x domestica
MKERQRWSAEEDALLRAYVKQYGPREWNLVSQRMNTPLDRDAKSCLERWKNYLKPGIKKGSLTEEEQRLVICLQAKHGNKWKKIAAEVPGRTAKRLGKWWEVFKEKQQREQKNKKITDPIVEGKYDTILETFAEKLVKERAPTYLMATSNGAYLHTETSSPAPTILPPWLSNSNVSPNVRPPSPSVTLSLSPTVAPSPPIPWLQQDRGSDGSFVVGNLPHHGVVPACGENLVISELVECSRELEEMHRAWAAHKKEASWRLRRVELQLDSEKACRRREKMEEIEAKVKALREEQKAALDRIEAEYREQLAGLRRDAEAKEQKLAEQWAAKHLRLSQFLEQMGGRPRIVEPNGR

SEQ ID NO: 250 - DNA, 1375 bp, Medicago truncatula
ccatttttcaacttcttcttcctgtttcatggacctgaatttcttaggttgttattagacatactcacactgtgactgagagacattatgaagattgcaagtttcaagaaaccggatgtcggatatgaaagataggcagcggtggagagcagaagaggatgcattattacgcgcttatgttaaacagtatggacctagagaatggaacctcgtgtctcagcgcatgaacacgcctcttaacagggacgcaaaatcgtgtttagaaaggtggaagaattacctcaagccaggtattaagaaaggatctctcaccgaagaagaacagcgtctagtcattagccttcaagcaacacacggaaacaaatggaagaaaattgccgcgcaagttcccggtcgaactgctaagaggttagggaagtggtgggaagtattcaaagagaaacaacaaagagaaacaaaaggtagtattaacagaactgtcgacccgattaacgatagcaagtacgaacacatactcgaaagttttgctgagaaactagtgaaagagagaccatctccttcatttgtcatggctgcttccaatagctcttatcttcataccgatgcacaagcaccaactccgggattgcttccttcatggctatcgaattcaaataatgcagcacctgttaggccaaattcaccatcagtgacactaagcctatctccctcgacagtagcagcgcctcctccgtggatgcaaccagtacgaggaccggacaacgctcctcttgttcttgggaacgtagctccacatggcgctgttctaagttacggcgaaagcatggtaatgtctgaattggttgattgctgcaaggagttggaagaagtgcatcatgcattggcagcgcacaagaaagaggcggcatggaggttaagccgagtggagctgcagttggagtcagagaaagcgagtcgaaggagggagaagatggaggaaatcgaagcgaagataaaagctttaagggaggaacaagctgttgctttggatagaattgaaggagaatatagggaacagttagcagggctgagaagagatgctgaaaccaaagagcagaaattgactgaacaatgggctgcgaagcatttacgccttaccaagtttctagaacaagtagggtgtagatcaaggcatgctgaatcaaatggaagatagatagaaagagagacagacatcactttcagcattttgatctagttaaggttttgtgtgattgagttttatgcagttttatggtccttgttagtttttgttctttgttcctatttgattaaaaaatgttcttatagatgcatattaatatcctatcttttcatacaacttgaggactttgca

SEQ ID NO: 251 - protein, 359 aa, Medicago truncatula
MSDMKDRQRWRAEEDALLRAYVKQYGPREWNLVSQRMNTPLNRDAKSCLERWKNYLKPGIKKGSLTEEEQRLVISLQATHGNKWKKIAAQVPGRTAKRLGKWWEVFKEKQQRETKGSINRTVDPINDSKYEHILESFAEKLVKERPSPSFVMAASNSSYLHTDAQAPTPGLLPSWLSNSNNAAPVRPNSPSVTLSLSPSTVAAPPPWMQPVRGPDNAPLVLGNVAPHGAVLSYGESMVMSELVDCCKELEEVHHALAAHKKEAAWRLSRVELQLESEKASRRREKMEEIEAKIKALREEQAVALDRIEGEYREQLAGLRRDAETKEQKLTEQWAAKHLRLTKFLEQVGCRSRHAESNGR

SEQ ID NO: 252 - DNA, 1333 bp, Morus alba
atgaaagagcgtcagcgttggcagcccgaagaagacgcactcctccgagcctacgtgaagcaatatggccccagggactggaacctcgtttaccagcgcatgggcaagcccctccaccgcgacccaaagtcctgcctcgagcggtggaagaactacctgaaacccggcctgaaaaagggttctctcacgccggaggagcaatccctcgtcatttctctccaagccaagtacggtaacaagtggaagaagatcgccgccgaggtccccggccgcacggccaagcgcctcggcaagtggtgggaggtcttcaaggagaagcagctcaagcagctccagctccagaagaaaccgccgtcgcagcccgacgggaatattccggtagccgtagcagtagccggaggatcttccccagcggataaggccgtacagggtccgtacgaccacatactggagacgttcgccgaaaagtacgtccaccaacagcggcctaacctaaaccccgcaattttacccgtcgtcccgtttccgatgcccaacccggatccggttctctcactcgggtcggttaattccactccgcctcccgcgcttcccccgtggatgaatttgaacgttaacgtcaacgcaacgacgtcgtcgctctcgtcctgcacaacgtcgtccagcgcgacgccgtctccctccgtcagcctctcgctctccccgtcagagccggtacagcagcagacgctcgaacaggagatgaaccggttcttgccggttcagcaaatggcgagcattttccagtgctgtaaggagctggaggaggggcggcagagctggttgcagcacaagaaggaggccacgtggcggccgagccggctggagcagcagctggagtcggagaagtcgaagaagaggaaagagaagatggaagagattgacgccaagatacggagcttgagagaagaggaaatggcgtttctcagtaggattgagggcgagtatagagaacagcttttggctttgcaaagagatgccgaggccaaggaggccaaactggttgaagcttggtgtggtaagcatgtgaagctggctaagctccttgaccagattggggcccaccattgttgtaatgccactaatggtttcaccgcttttcccaatccaaattagtgattttaagtgaaattaatgacaagaaaaaaacgttcgatgtgttgatccaacaaattagcattcaaaggtcgaatcttcgtagtacttgcgcactttttcgtgggtgttatggaagatgtgttatttgtgctgtgaatattgatgcttccttcgtttaaaaaaaaaaaaaaaaaaa

SEQ ID NO: 253 - protein, 384 aa, Morus alba
MKERQRWQPEEDALLRAYVKQYGPRDWNLVYQRMGKPLHRDPKSCLERWKNYLKPGLKKGSLTPEEQSLVISLQAKYGNKWKKIAAEVPGRTAKRLGKWWEVFKEKQLKQLQLQKKPPSQPDGNIPVAVAVAGGSSPADKAVQGPYDHILETFAEKYVHQQRPNLNPAILPVVPFPMPNPDPVLSLGSVNSTPPPALPPWMNLNVNVNATTSSLSSCTTSSSATPSPSVSLSLSPSEPVQQQTLEQEMNRFLPVQQMASIFQCCKELEEGRQSWLQHKKEATWRPSRLEQQLESEKSKKRKEKMEEIDAKIRSLREEEMAFLSRIEGEYREQLLALQRDAEAKEAKLVEAWCGKHVKLAKLLDQIGAHHCCNATNGFTAFPNPN

SEQ ID NO: 254 - DNA, 1704 bp, Nicotiana tabacum
ctcatcacattcccttaaacacgtcaccctccaaactactactattacagagaggaggggccataccattccataccttagcctttctctcttatagcttgctctcaccttcccctcttttctttatcttctgtcacttctctctcttcttctttcttctacccttttcctctttctttctttgcatacaacattcttcttcctctttctaattttttgctcatatttgctctgagaaaaacaaaacaatttaaaaaaaaaatcaaatgggtcgaggcaagaactgggcttcctaagtggtttcttgtaaattatgaggagtttgggaccatgggcactggtgtttgcacctggaaatgagggagaggcagcggtggcgatctgaagaggatgctttattgcgggcatatgtgaaacagtatggaccaaaagaatggcaccttgtatcacagcgtatgaacacagccctcaacagggacgctaagtcttgcttggaaaggtggaaaaactacctcaaaccagggattaagaaaggatcactcactcaagaggagcagcgtcttgttatccatctacaggccaaacacggcaacaaatggaagaaaatagcagctgaagtaccaggccgaactgctaaaagattggggaagtggtgggaagtattcaaagagaagcaacacagggagcagaaagaaaacaataaggttgtcgatccagtagacgagggaaaatacgaccacattcttgagacctttgcagagaagattgtgaaagagcggagtgtcccaggtttacttatggctacttctaatggaggtttcctccacgccgatgcaccagctccttcgccacaaactcttcttcctccgtggctttctaattccactgctacttcaaccgtcagatcaccatctccatctgtgactttaagtctatccccctcaacagtgcctcctacacctacgcctacgcctggcattccgtggctacagacagatagaggacctgaaaatgcgccccttattttgagcagttttccacatcatggggttgcccctccttgtggagaaaatccatttgttactgaacttgtggaatgctgtaaagagctagacgaagggcatcgtgcttgggctgctcataaaaaggaagcagcttggaggttaaggcgagtggaattgcagctagaatcagagaaaatatgcaaagttagggagaagatggaggaaattgaagcgaaaatgaaagctctgagggaagagcagaaggcaactctagacaggattgaagcagaatacaaggagcaactagcaggcttgaggagggacgcggaagcaaaggaacagaaattggccgaacaatgggcttccaaacacctgcgccttagtaagtttcttgagcagatgggatgccaatcaagacttgcagaacctaatggtggccgctaaagcaagctaagctaagaattcttttgtgtgtccctggccgcctaagacggttcttttcaaactgctacgacttttcttactgtaaactttttgtttgatcgccttttatttggttaactatgttttcttttctgcatgatactgcaacttgtatttctagtatctgcaaggatttcttgcagctttgcgacagcataatgaacctatatctttcagtagtaacatattaatagtattacttacacaaaaaaaaaaa

SEQ ID NO: 255 - protein, 363 aa, Nicotiana tabacum
MRERQRWRSEEDALLRAYVKQYGPKEWHLVSQRMNTALNRDAKSCLERWKNYLKPGIKKGSLTQEEQRLVIHLQAKHGNKWKKIAAEVPGRTAKRLGKWWEVFKEKQHREQKENNKVVDPVDEGKYDHILETFAEKIVKERSVPGLLMATSNGGFLHADAPAPSPQTLLPPWLSNSTATSTVRSPSPSVTLSLSPSTVPPTPTPTPGIPWLQTDRGPENAPLILSSFPHHGVAPPCGENPFVTELVECCKELDEGHRAWAAHKKEAAWRLRRVELQLESEKICKVREKMEEIEAKMKALREEQKATLDRIEAEYKEQLAGLRRDAEAKEQKLAEQWASKHLRLSKFLEQMGCQSRLAEPNGGR

SEQ ID NO: 256 - DNA, 1489 bp, Oryza sativa
ctcgctgctccttgtcccccacctcctttacttgagcttgctcaccactgcctccatatacagagagtcttctctgtatttctctctctcagtgggaggctcacaagaatctttcagctcacatctcactgtccttgcctttctctagctagggaggtccaagaacagagcagcaggatggtgcagtggcgtttctgagagcagcatgagtactcgcaccaccgagctgggatggtcggcgatggcgaacaccgatgcagccgccgccgatgagggagaggcagcggtggcggcctgaggaagacgccatcctcctcgcctacgtccgccagtatgggccccgggagtggagcctcgtgtcccagcggatgaaccgccccctccaccgcgacgccaagtcctgcctcgagcgctggaagaactacctccgcccggggatcaagaaaggttcgctcaccgacgacgagcagcgcctcgtcatccgcctccaggccaagcacggcaacaagtggaagaagatcgccgccgaggtccccggccggacggcgaagcggctgggcaagtggtgggaggtgttcaaggagaagcagcagcgggagctccgggatcgggatcgccggcgactcccgccgccgctggacggcgacgagcgcggctgcgccggcgggcgatacgactggctcctcgaggacttcgccgacaagctcgtcaacgaccaccaccgccgaatgatggctgccccgatcctcccgccgtggatgtcgtcgtcgccgtcgtcttcttcctcgccgtcggtgacgcttagcctcgcgtcggcggcggtggcgccggcgcctgcggcgccgccgccgacgtggggtggtggtggaggaggggaggtggtggtggcggagttgatggagtgttgcagggagatggaggaagggcagagggcgtgggcggcgcacaggaaggaggcggcgtggaggatgaagagggtggagatgcagctggagacggagagggcgtgccggcggcgggaggcgacggaggagttcgaggcgaagatgagggcgctgagggaggagcaggcagctgcggtggagcgggtggaggcggagtaccgggagaagatggccggcctccgccgcgacgcggaggccaaggagcagaagatggcggagcagtgggcggccaagcacgcccgcctcgccaagttcctcgaccaggtcgccgcctgccgccgctggccgcccgtagagatcaacggcggcggcggcggcggccccggcggcggccggtgagccgccggacggtggcgctgcatgcatgcgtagttggacacctcgctttcttgcttcttcttctcgtgtcctttttacaactgttggaattcacttctctctagaaatatgtaatcttttgagtctcttttgatcattccaagtttcctactagtagctctattgaataataaatggaccaccaaattgcaaaccaaaatggttac

SEQ ID NO: 257 - protein, 342 aa, Oryza sativa
MQPPPMRERQRWRPEEDAILLAYVRQYGPREWSLVSQRMNRPLHRDAKSCLERWKNYLRPGIKKGSLTDDEQRLVIRLQAKHGNKWKKIAAEVPGRTAKRLGKWWEVFKEKQQRELRDRDRRRLPPPLDGDERGCAGGRYDWLLEDFADKLVNDHHRRMMAAPILPPWMSSSPSSSSSPSVTLSLASAAVAPAPAAPPPTWGGGGGGEVVVAELMECCREMEEGQRAWAAHRKEAAWRMKRVEMQLETERACRRREATEEFEAKMRALREEQAAAVERVEAEYREKMAGLRRDAEAKEQKMAEQWAAKHARLAKFLDQVAACRRWPPVEINGGGGGGPGGGR

SEQ ID NO: 258 - DNA, 1506 bp, Pisum sativum
gtttttaagaacccatttcaacttcctctcttctgtttcatggaccagaattttttatcttcttcttaaaacactctgagagacattatgaagatttcaagttttgagaaaccggctgtgggatatgtccttggaaatgaaggataggcagcggtggagagcggaagaggatgcattactacgcgcttatgtcaaacagtatggtcctagggaatggaaccttgtgtctcagcgcatgaacacacctcttaaccgtgacgcaaagtcgtgtttagaacggtggaagaactacctcaagccgggtattaagaaaggatctttaactgaggaagagcagcaccttgtcattagtcttcaagcaacgcacgggaacaagtggaagaaaatcgctgcacaagttcccggtcgcactgctaagagattaggtaagtggtgggaagttttcaaagagaagcaacaaagagaaacaaaagggataaacaaaaccgtcgatccgatcaacgatagcaagtacgaacatatactcgaaagttttgcggagaagctagtgaaagagagaccttcaccttcatttgtcatggctgcttccaacagttcgtatcttcataccgacgcacaagcagcaacaccgggattgcttccttcatggctttcaaattccaacaatacagcacctgttaggccgaattctccttctgtgacattaagcctctctccctcgactgttgcagcacctcctccgtggatgcagcctgtacgaggaccggacaatgcgcctcttgttctcgggaacgtagctcctcacggcgctgttctatcttacggcgaaaacatggtgatgtctgagttaatagattgctgtaaggaattggaagaagggcatcacgcactggcagcgcacaagaaagaggcagcatggaggttaagccgagtggaactgcagttggagtcagagaaagcaagtcgaaggagggaaaagatggaggaaatcgaagcgaagataaaagctttgagggaggaacaagcggttgcgttggatagaattgaaggagaatatagagaacagttagcagggttgagaagagacgccgaggcgaaagagcagaaactggctgaacaatgggctgctaagcatttgcgccttacgaagtttctagaacaggtagggtgtagatcaaggcatgctgaacaaaatggaagatgaagagacagaaacatgattttcagcattgtgatctagttaaggttgtgtctttgtttatggtacttgttagttttgttcttgtccctatttggaagaaaatgttactatagatgcctattaatattcctatcttttcatacaatcttgagaactttgcatttgcattaggggttgatgcaatgcattgttatagttattacattcatctttatattcatatgccatagtatgtttatgtaatggtttttcattttggggtttcttttgtaataatcaactttatgagcaagatgtgtactact

SEQ ID NO: 259 - protein, 359 aa, Pisum sativum
MSLEMKDRQRWRAEEDALLRAYVKQYGPREWNLVSQRMNTPLNRDAKSCLERWKNYLKPGIKKGSLTEEEQHLVISLQATHGNKWKKIAAQVPGRTAKRLGKWWEVFKEKQQRETKGINKTVDPINDSKYEHILESFAEKLVKERPSPSFVMAASNSSYLHTDAQAATPGLLPSWLSNSNNTAPVRPNSPSVTLSLSPSTVAAPPPWMQPVRGPDNAPLVLGNVAPHGAVLSYGENMVMSELIDCCKELEEGHHALAAHKKEAAWRLSRVELQLESEKASRRREKMEEIEAKIKALREEQAVALDRIEGEYREQLAGLRRDAEAKEQKLAEQWAAKHLRLTKFLEQVGCRSRHAEQNGR

SEQ ID NO: 260 - DNA, 1264 bp, Solanum tuberosum
  misc_feature (1255)..(1255): n is a, c, g, or t
tcattttctcttttgctaaaacatattctccttctatcttttctctttttttactcttattttcttgaaatacaacaaaaaagaacatatgggtcgagctaaaaactgggatgcctaagttgttttttgaaaattatgaggagtttgggacgatggaaactggtgttgacacctggaaatgagggagaggcaacggtggcgagctgaagaggatgctttgttgcgagcatacgtgagacagtatggaccaaaagaatggcaccttgtatcacagcgtatgaacacaccccttaacagggacgcgaagtcttgtttagaaaggtggaaaaactatctcaaaccagggattaaaaaaggatcactcactgaagacgaacagcgtcttgttatccaattacaggctaaacatggtaacaaatggaagaaaatagcagctgaagtaccaggtcgaactgctaaaagactaggaaagtggtgggaagttttcaaagagaagcaacagagagagcagaaagaaaacaacaaggttgttgatccagtagacgagggaaaatacgatcacattctcgaaacctttgcagagaagattgtgaaagagcggagtgtcccaggattacttatggctacttctaatggaggtttcctccactctgatgcctcaactcctacgccacaaaatcttcttcctccgtggctttctaattcaactgctccttcaactgtcagatcatcatctccatctgtgactttaagtctctctccctcgacagtgccacctacaccaacgcctggcattccgtggctacagacagatagaggaccagataatgcatctctcatcttgagcagttttccacatcacggtgttgcacctccttgtggagaaaatccatttattactgaacttgcagaatgctgtaaggatttagacgaagggcatcgtacttggactgcacataagaaggaagcaacttggaggttaaggagggttgagttacaactagaatccgagaaagcaagcaaagttagggagaagatggaagaaattgaagcgaaaatgaaagctctgagggaagaacagaaagcaacactagacagaattgaagcagaatacaaggaccaactagcaggcttgaggagggatgcagaagcaaaagagcagaaattggcagagcaatggacatccaaacacatgcgccttgctaagtttcttgaacagatgggatgccaatctagacttgctgaacctaatggnggccgctaa

SEQ ID NO: 261 - protein, 361 aa, Solanum tuberosum
MRERQRWRAEEDALLRAYVRQYGPKEWHLVSQRMNTPLNRDAKSCLERWKNYLKPGIKKGSLTEDEQRLVIQLQAKHGNKWKKIAAEVPGRTAKRLGKWWEVFKEKQQREQKENNKVVDPVDEGKYDHILETFAEKIVKERSVPGLLMATSNGGFLHSDASTPTPQNLLPPWLSNSTAPSTVRSSSPSVTLSLSPSTVPPTPTPGIPWLQTDRGPDNASLILSSFPHHGVAPPCGENPFITELAECCKDLDEGHRTWTAHKKEATWRLRRVELQLESEKASKVREKMEEIEAKMKALREEQKATLDRIEAEYKDQLAGLRRDAEAKEQKLAEQWTSKHMRLAKFLEQMGCQSRLAEPNGGR

SEQ ID NO: 262 - DNA, 1077 bp, Vitis vinifera
atgaaggagaggcagcgttggagggctgaagaggacgctctattacgtgcttatgtgagacaatatggcccgagggaatggaaccttgtgtcacagcgtatgaacacgccccttgatagggatgccaaatcttgcctagaaaggtggaagaattacctcagacctggaatcaagaaaggatccctcactgaagaggagcaacgtcttgtaattcgtcttcaggccaaacacggcaacaaatggaagaaaattgcagctgaagtccctggacgtactgctaagagattggggaagtggtgggaagtgttcaaagagaagcagcagagagagcagaaagagaacaacaaggttgtggaccccattgaggagggcaagtacgatcggattctagagacttttgcagagaagttagtgaaagagcgtcctgccccagcatttctgatggctacttctaatggaaactttcttcatcctgatccacctgctcctcccccaccaactctacttcctccttggctttccaattccaactgcacctccactgttaggccaccctccccttctgtcaccttaagtctctgtccctcaacagttgcaacctcaccgacaattccatggctgcagccagagagagggccagacgccaccccgcttgttttgggcaacttgccaccccatggggcagtccccacgtctggagagaacttactgatttcagagctagtggagtgctgcagggagttggaagaagggcaccgagcttgggcagcacataagaaggaggcagcctggaggttaagaagggttgagctgcaactggaatcggagaaagcatgccgaaggagggaaaaaatggaagagatagaatcaaaggtgaaggctcttagggaagaacagaaggctacactggataggattgaggctgaatacagggaacagttagcaggactgaggagggatgcagaatccaaggagcagaagttggctgagcagtggagtgcaaagcacttgcgccttaccaaatttattgagcagatgggatgcagacccaggcttgccgagccaaatggccggtga

SEQ ID NO: 263 - protein, 358 aa, Vitis vinifera
MKERQRWRAEEDALLRAYVRQYGPREWNLVSQRMNTPLDRDAKSCLERWKNYLRPGIKKGSLTEEEQRLVIRLQAKHGNKWKKIAAEVPGRTAKRLGKWWEVFKEKQQREQKENNKVVDPIEEGKYDRILETFAEKLVKERPAPAFLMATSNGNFLHPDPPAPPPPTLLPPWLSNSNCTSTVRPPSPSVTLSLCPSTVATSPTIPWLQPERGPDATPLVLGNLPPHGAVPTSGENLLISELVECCRELEEGHRAWAAHKKEAAWRLRRVELQLESEKACRRREKMEEIESKVKALREEQKATLDRIEAEYREQLAGLRRDAESKEQKLAEQWSAKHLRLTKFIEQMGCRPRLAEPNGR

SEQ ID NO: 264 - DNA, 1420 bp, Zea mays
cgcgcattataaggtgtggtggtgagggatgggcgatggcctttgcagatgaaggagcgacagcgctggcggcctgaggaagacgccgtcctgcgcgcctacgtccggcagtacggcccccgcgagtggcacctggtgtcgcagcgcatgaacgtggccctcgaccgcgacgccaagtcgtgcctggagcgctggaagaactacctccgccccgggatcaagaagggctcgctcaccgaggaggagcagcgcctggtgatccgcctgcaggccaagcacggcaacaagtggaagaagatcgccgccgaggtgcccgggcgcacggccaagcgcctcggcaagtggtgggaggtgttcaaggagaagcagcagcgggagctgagggacagccgccgcccgccgccggagcctagccccgacgagcggggcaggtacgagtggctgctcgagaacttcgcggagaagctcgtcggagagaggccacagcaggctgccgctgcgccgtcgccgctgctcatggccgcgcccgtgctgccgccctggctgtcgtccaacgccgggccggccgccgccgccgccgccgccgtcgcgcacccgccgcccagaccgccgtcgccgtccgtgacgctcagcctcgcgtccgccgcggtggcgccgggcccgcccgcgcccgcgccatggatgccggatcgcgccgcggccgacgcggcgccgtacgggttcccgagcccgtcgcagcacggcggcgccgcgcccccgggcatggcggtcgtggacgggcaggcgctggcggagctcgccgagtgctgccgcgagctggaggaggggcggcgcgcgtgggcggcgcaccggcgggaggcggcgtggcggctgaagcgcgtggagcagcagctggagatggagcgcgagatgcggcggcgcgaggtgtgggaggagttcgaggccaagatgcgcaccatgcggctggagcaggcggccgccgcggagcgcgtggagcgggaccaccgggagaaggtggccgagctccgccgcgacgcgcaggtcaaggaggagaagatggccgagcagtgggccgccaagcacgcgcgcgtcgccaagttcgtcgagcagatgggggggtgctcccgttcatggtcctctgccaccgacatgaactgttgaactggacaaacgagccgctgaccacaccgtcgctagctatcgcgtgctacgtgctccggttcacggctttcttgcattctgggacgcgacttgtaaacgccatggattcccttgctcacgttcacttccgctttctttttttcttttctttttatttacaactgttgttacggtcggttcaatgcttctctctctatctactagtagttgatcagagtcaagaaatgtaatgctgccgttactgtcgtagtttcatcct

SEQ ID NO: 265 - protein, 370 aa, Zea mays
MKERQRWRPEEDAVLRAYVRQYGPREWHLVSQRMNVALDRDAKSCLERWKNYLRPGIKKGSLTEEEQRLVIRLQAKHGNKWKKIAAEVPGRTAKRLGKWWEVFKEKQQRELRDSRRPPPEPSPDERGRYEWLLENFAEKLVGERPQQAAAAPSPLLMAAPVLPPWLSSNAGPAAAAAAAVAHPPPRPPSPSVTLSLASAAVAPGPPAPAPWMPDRAAADAAPYGFPSPSQHGGAAPPGMAVVDGQALAELAECCRELEEGRRAWAAHRREAAWRLKRVEQQLEMEREMRRREVWEEFEAKMRTMRLEQAAAAERVERDHREKVAELRRDAQVKEEKMAEQWAAKHARVAKFVEQMGGCSRSWSSATDMNC

SEQ ID NO: 266 - DNA, 1266 bp, Hordeum vulgare
  misc_feature (881)..(881): n is a, c, g, or t
  misc_feature (991)..(991): n is a, c, g, or t
  misc_feature (1194)..(1194): n is a, c, g, or t
cagccaccctagtcactccgagctgagctgggcgaagagaagagaaagaatctttcggttgagatctcccccctcccttgcaataattttcggctgtctctctctcctgcaactgttgttgattcagagacgccaagaacagcgcaagaacagcatggtgtagtggtgcctctagtgcattatgaggtgtgaggagttgggatgggcgatggcctgtggtgcaggtgcagatggagatgaaggagagacagcggtggcggcctgaggaagacgccatcctccgctcctacgtccggcagtatggcccacgtgagtggaacctggtggcgcagcggatgaacgcgcccctcgaccgcgacgccaagtcctgcctcgagcgctggaagaactacctccgccccggcatcaagaaagggtccctcaccgacgacgagcagcggctcgtcatccgcctccaggccaagcacggcaacaagtggaagaagatcgccgccgaggtgcctggccggacggccaagcggcttggcaagtggtgggaggtgttcaaggagaagcagcagcgggagatcagggacagccggaggccgccgcccgagcccagccccgacgagaggggaaggtacgagtggctgctcgagaacttcgccgagaagcttgtcaaggagaggcagcagggtgggtgcgacgccgctgcaccaccacctcatggctgctcccatgctcccgccctggatgtcgtccaccgccaccaacggcgcgcccgtctcaaatgcgccgccgtcgccgtccgtcacgctcagcctcgcctccgccgtcgccgcgcccccgcccgcggcgccgtggatgcagcagcagcagcagatggtggaagacgggcgcgnccggttcgggttcgcaagcccgccgccggcgccgggcatgggggcggatggctcccaggcagcgctggcggaactggccgagtgctgcagggagctggacgaggggcacnatggctgggccgcgcaccggaagaggcatcttgaggctgaagcgcgggagctcaacttggatcggacccactgtcccgcgcggcaagtccccgaagaattaaggccaaatacggcgcttggggaggacacagcgccccttggacccctgaggcgaatccagaagaaggtgcgactccgcgatactagctagagcataaagtgnagatgggccccacccgccctacattactgagagtgtttttgtcgcgtgcccgaagaagacctggcgcgcgtt

SEQ ID NO: 267 - protein, 141 aa, Hordeum vulgare
MKERQRWRPEEDAILRSYVRQYGPREWNLVAQRMNAPLDRDAKSCLERWKNYLRPGIKKGSLTDDEQRLVIRLQAKHGNKWKKIAAEVPGRTAKRLGKWWEVFKEKQQREIRDSRRPPPEPSPDERGRYEWLLENFAEKLV

SEQ ID NO: 268 - protein, 117 aa, Artificial sequence
  IPR015495 MYB transcription factor
WRAEEDALLRAYVKQYGPREWNLVSQRMNTPLNRDAKSCLERWKNYLKPGIKKGSLTEEEQSLVIRLQAKHGNKWKKIAAEVPGRTAKRLGKWWEVFKEKQQRELKENNKTVEPIDE

SEQ ID NO: 269 - protein, 50 aa, Artificial sequence
  IPR014778 MYB DNA binding domain
RQRWRAEEDALLRAYVKQYGPREWNLVSQRMNTPLNRDAKSCLERWKNYL

SEQ ID NO: 270 - protein, 46 aa, Artificial sequence
  IPR014778 MYB DNA binding domain
KGSLTEEEQSLVIRLQAKHGNKWKKIAAEVPGRTAKRLGKWWEVFK

SEQ ID NO: 271 - protein, 107 aa, Artificial sequence
  C-terminal Conserved Domain (CD)
SELVDCCRELEEGHRAWAAHKKEAAWRLRRVELQLESERSCRRREKMEEIESKIKSLREEEKASLDRIEAEYREQLTGLRRDAETKEQKLSDQWTAKHLRLTKFLEQ

SEQ ID NO: 272 - DNA, 2194 bp, Oryza sativa; identical to SEQ ID NO: 218

SEQ ID NO: 273 - DNA, 53 bp, Artificial sequence
  primer: prm11884
ggggacaagtttgtacaaaaaagcaggcttaaacaatgaaggagaggcagcgt

SEQ ID NO: 274 - DNA, 50 bp, Artificial sequence
  primer: prm11885
ggggaccactttgtacaagaaagctgggtgacctgatacagctggacgta

SEQ ID NO: 275 - DNA, 345 bp, Solanum lycopersicum
atggagaagacacttagcttagtgctaatactccctcttctaataatgcttcttcttgttggaactcatgcaaaaataataatagaatctccagcacctcagccacaacctcctaacactttaccaatgaatggtactactcctggtagtctccatcctcaagattgtttaccaaagtgcacatatagatgctcaaatacacaatataggaagccatgtatgttcttttgccaaaaatgttgtgcaaagtgtctctgtgttcctgctgggacttatgggaacaaacaattttgcccttgttacaataattggaagactaagagaggaggcccaaaatgcccttaa

SEQ ID NO: 276 - protein, 114 aa, Solanum lycopersicum
MEKTLSLVLILPLLIMLLLVGTHAKIIIESPAPQPQPPNTLPMNGTTPGSLHPQDCLPKCTYRCSNTQYRKPCMFFCQKCCAKCLCVPAGTYGNKQFCPCYNNWKTKRGGPKCP

SEQ ID NO: 277 - protein, 9 aa, Artificial sequence
  Motif 4, comprising 4 conserved Cys residues
  UNSURE (2)..(3): Unknown amino acid
  UNSURE (6)..(7): Unknown amino acid
  UNSURE (9)..(9): Unknown amino acid
CXXCCXXCX

SEQ ID NO: 278 - protein, 8 aa, Artificial sequence
  Motif 5
  VARIANT (3)..(3): /replace = "Leu"
  VARIANT (4)..(4): /replace = "Lys" /replace = "Gln" /replace = "Ala" /replace = "Ser" /replace = "Thr"
  UNSURE (6)..(7): Unknown amino acid
  VARIANT (8)..(8): /replace = "Gly" /replace = "Ala" /replace = "Ser"
CVPPGXXQ

SEQ ID NO: 279 - protein, 5 aa, Artificial sequence
  Motif 6
  VARIANT (3)..(3): /replace = "Ala" /replace = "Thr" /replace = "Phe" /replace = "Arg" /replace = "Asn"
  UNSURE (4)..(4): Unknown amino acid
  VARIANT (5)..(5): /replace = "Leu" /replace = "Trp" /replace = "Lys"
CYDXM

SEQ ID NO: 280 - protein, 10 aa, Artificial sequence
  Motif 7
  VARIANT (1)..(1): /replace = "Leu" /replace = "Tyr" /replace = "Lys" /replace = "Ala"
  VARIANT (3)..(3): /replace = "Lys" /replace = "Met" /replace = "Ile" /replace = "Asn" /replace = "Leu"
  VARIANT (4)..(4): /replace = "Met" /replace = "Ile" /replace = "Val" /replace = "Thr" /replace = "Ser"
  UNSURE (7)..(8): Unknown amino acid
  VARIANT (10)..(10): /replace = "Gly" /replace = "Ala" /replace = "Lys" /replace = "Arg" /replace = "His" /replace = "Ser" /replace = Asp"
SCGLCCXXCN

SEQ ID NO: 281 - protein, 13 aa, Artificial sequence
  Motif 8
  VARIANT (4)..(4): /replace = "Ser" /replace = "Pro" /replace = "Ala" /replace = "Lys" /replace = "Gln"
  VARIANT (6)..(6): /replace = "Pro" /replace = "Thr"
  VARIANT (7)..(7): /replace = "Tyr" /replace = "Leu" /replace = "Ala" /replace = "Ser" /replace = "Phe"
  VARIANT (8)..(8): /replace = "Ala" /replace = "Gly" /replace = "Gln"
  VARIANT (9)..(9): /replace = "Ser" /replace = "Pro" /replace = "Asn" /replace = "Asp"
  VARIANT (10)..(10): /replace = "Lys" /replace = "Thr" /replace = "Tyr" /replace = "Leu" /replace = "Gln" /replace = "Glu"
  VARIANT (11)..(11): /replace = "Ser" /replace = "His" /replace = "Arg" /replace = "Glu" /replace = "Asn"
  UNSURE (12)..(12): Unknown amino acid
  VARIANT (13)..(13): /replace = "Ile"
CVPTGSGSTRDXC

SEQ ID NO: 282 - protein, 7 aa, Artificial sequence
  Motif 9
  VARIANT (1)..(1): /replace = "Arg" /replace = "Lys" /replace = "Thr"
  VARIANT (4)..(4): /replace = "Asp" /replace = "Thr" /replace = "Phe" /replace = "Ala"
  VARIANT (5)..(5): /replace = "Gln" /replace = "Arg" /replace = "Asn" /replace = "Ser" /replace = "Thr" /replace = "His" /replace = "Glu"
  VARIANT (6)..(6): /replace = "Lys" /replace = "Trp" /replace = "Leu"
  VARIANT (7)..(7): /replace = "Val" /replace = "Lys" /replace = "Arg" /replace = "Thr" /replace = "Asn" /replace = "Ile"
PCYRDML

SEQ ID NO: 283 - protein, 23 aa, Artificial sequence
  motif 10
  VARIANT (1)..(1): /replace = "Thr"
  VARIANT (2)..(2): /replace = "Pro" /replace = "Val" /replace = "Ala"
  VARIANT (4)..(4): /replace = "Asn" /replace = "MEt" /replace = "Ile"
  VARIANT (5)..(5): /replace = "Thr"
  VARIANT (6)..(6): /replace = "Phe" /replace = "Leu"
  VARIANT (8)..(8): /replace = "Leu" /replace = "Gln"
  VARIANT (9)..(9): /replace = "Tyr" /replace = "Lys"
  VARIANT (12)..(12): /replace = "Lys" /replace = "Glu" /replace = "Asn" /replace = "Ala" /replace = "Arg"
  VARIANT (13)..(13): /replace = "Arg" /replace = "Lys" /replace = "Thr" /replace = "Ser" /replace = "Ala"
  VARIANT (15)..(15): /replace = "Leu" /replace = "Arg"
  VARIANT (18)..(18): /replace = "Leu"
  VARIANT (19)..(19): /replace = "Ser" /replace = "Lys" /replace = "Ala"
  VARIANT (21)..(21): /replace = "Thr" /replace = "Val" /replace = "Asn" /replace = "Phe" /replace = "Leu"
  VARIANT (22)..(22): /replace = "Tyr" /replace = "Phe"
KRCLFYCNHCCGWCQCVPPGYVG

SEQ ID NO: 284 - protein, 14 aa, Artificial sequence
  Motif 11
  VARIANT (1)..(1): /replace = "His"
  VARIANT (3)..(3): /replace = "Asp" /replace = "Glu" /replace = "Gln" /replace = "Ala"
  VARIANT (4)..(4): /replace = "Glu" /replace = "Thr" /replace = "Ser" /replace = "Phe" /replace = "Ala" /replace = "Val"
  VARIANT (5)..(5): /replace = "Trp"
  VARIANT (6)..(6): /replace = "Pro"
  VARIANT (9)..(9): /replace = "Arg"
  VARIANT (10)..(10): /replace = "Asp"
  VARIANT (11)..(11): /replace = "Leu" /replace = "Met"
  VARIANT (12)..(12): /replace = "Thr" /replace = "Glu"
  VARIANT (13)..(13): /replace = "Lys" /replace = "Glu" /replace = "Asn"
  VARIANT (14)..(14): /replace = "Lus"
NKGCCSCYNNWKTQ

SEQ ID NO: 285 - protein, 8 aa, Artificial sequence
  Motif 12
  VARIANT (1)..(1): /replace = "Arg"
  VARIANT (2)..(2): /replace = "ys"
  VARIANT (3)..(3): /replace = "Lys"
  VARIANT (4)..(4): /replace = "Gln" /replace = "Ala" /replace = "Asn" /replace = "Lys" /replace = "Gly"
  VARIANT (5)..(5): /replace = "Thr"
  VARIANT (6)..(6): /replace = "Ser" /replace = "Gln" /replace = "Ala" /replace = "Lys"
  VARIANT (7)..(7): /replace = "Tyr" /replace = "Phe"
  VARIANT (8)..(8): /replace = "Thr" /replace = "Arg" /replace = "His"
NGSHKGHK

SEQ ID NO: 286 - DNA, 56 bp, Artificial sequence
  primer: prm10623
ggggacaagtttgtacaaaaaagcaggcttaaacaatggagaagacacttagctta

SEQ ID NO: 287 - DNA, 50 bp, Artificial sequence
  primer: prm10624
ggggaccactttgtacaagaaagctgggtatatatgattaagggcatttt

SEQ ID NO: 288 - DNA, 56 bp, Artificial sequence
  primer: prm10625
ggggacaagtttgtacaaaaaagcaggcttaaacaatgaagaagctcttctttgct

SEQ ID NO: 289 - DNA, 50 bp, Artificial sequence
  primer: prm10626
ggggaccactttgtacaagaaagctgggtacatgcacatcttgactgtct

SEQ ID NO: 290 - DNA, 2194 bp, Oryza sativa; identical to SEQ ID NO: 218

SEQ ID NO: 291 - protein, 89 aa, Populus thrichocarpa
MKKLFFVTLLLCSLLFSSSFLEPVMTKSSFCAKKCDTRCANAGIQDRCLKYCGICCEQCKCVPSGTYGNKHECPCYRDKRNSKGKPKCP

SEQ ID NO: 292 - protein, 112 aa, Medicago truncatula
MERKITLLILMVALLFCMTKVLCADSSVHIQDQFTHFEVVKGPNRRLLAFVDCGTRCNVRCSVHSRPNVCMRACGTCCLRCKCVPPGTYGNREMCGRCYTDMITRGNKPKCP

SEQ ID NO: 293 - protein, 106 aa, Arabidopsis thaliana
MMKLIVVFVISSLLFATQFSNGDELESQAQAPAIHKNGGEGSLKPEECPKACEYRCSATSHRKPCLFFCNKCCNKCLCVPSGTYGHKEECPCYNNWTTKEGGPKCP

SEQ ID NO: 294 - protein, 97 aa, Arabidopsis thaliana
MANCIRRNALFFLTLLFLLSVSNLVQAARGGGKLKPQQCNSKCSFRCSATSHKKPCMFFCLKCCKKCLCVPPGTFGNKQTCPCYNNWKTKEGRPKCP

SEQ ID NO: 295 - protein, 106 aa, Arabidopsis thaliana
MAKSYGAIFLLTLIVLFMLQTMVMASSGSNVKWSQKRYGPGSLKRTQCPSECDRRCKKTQYHKACITFCNKCCRKCLCVPPGYYGNKQVCSCYNNWKTQEGGPKCP

SEQ ID NO: 296 - protein, 101 aa, Arabidopsis thaliana
MAKLITSFLLLTILFTFVCLTMSKEAEYHPESYGPGSLKSYQCGGQCTRRCSNTKYHKPCMFFCQKCCAKCLCVPPGTYGNKQVCPCYNNWKTQQGGPKCP

SEQ ID NO: 297 - protein, 78 aa, Allium cepa
MLVESAKNGYGQGSLRSYQCSGQCARRCSKTQYRKPCLFFCNKCCAKCLCVPPGFYGNKGVCPCYNNWKTQQGGPKCP

SEQ ID NO: 298 - protein, 119 aa, Allium cepa
MANSTCILLLSLHLLLIIATAIQVKHAHAPTLQPVNSTAPTAQPNYPSHGFTEGSLQPQECGGRCDVRCSATQYRKPCMFFCQKCCATCRCVPSGTYGNKQTCPCYNNWKTKRGGPKCP

SEQ ID NO: 299 - protein, 118 aa, Allium cepa
MQSSAFSTVMPRSSDSLGTRGAKLYLGVTPLGRPKLDKITLAPLLIKYLIVGTAARILVSSVIFWLSSRGTFKSALTNTFFPFNSAALKSPTLLLAMETTPLGPLVRCVEKARALDET

SEQ ID NO: 300 - protein, 152 aa, Oryza sativa
MEGVGVGVRIRALLCCIAMAAMLLSSYQQGQAEASYMPWPPATPPPPAAAAANSTSTAAANNSSSSSSTTAPPQQPTAFPMYGVTPGSLRPQECGGRCAYRCSATAYRKPCMFFCQKCCASCLCVLPGTYGNKQSCPCYNDWKTKRGGPKCP

SEQ ID NO: 301 - protein, 105 aa, Oryza sativa
MAPGKLAVFALLASLLLLNTIKAADYPPAPPLGPPPHKIVDPGKDCVGACDARCSEHSHKKRCSRSCLTCCSACRCVPAGTAGNRETCGRCYTDWVSHNNMTKCP

SEQ ID NO: 302 - protein, 117 aa, Oryza sativa
MDPASRSLSIIFFLVAVTFVVEVSGQKNEAVYHLFGGEGSLTKNECPGKCSYRCSATSHTTVCMTYCNYCCERCLCVPSGTYGNKEECPCYNNMKTQEGKPNVCELGIEEKRNDTGE

SEQ ID NO: 303 - protein, 117 aa, Oryza sativa
MDTLHNTPTLKLLAWSLGPAFTSTMKLNTTTTLALLLLLLLASSSLQVSMAGSDFCDGKCKVRCSKASRHDDCLKYCGVCCASCNCVPSGTAGNKDECPCYRDMTTGHGARKRPKCP

SEQ ID NO: 304 - protein, 92 aa, Oryza sativa
MASMAKSLLCISLVAILLLVETTAPHGQAYAIDCGAKCGYRCSKSGRPKMCLRACGTCCQRCGCVPPGTSGNENVCPCYANMTTHNGRHKCP

SEQ ID NO: 305 - protein, 117 aa, Oryza sativa
WSFREMALAGRLLVLFAIALLAISIAEHKALAKGSTSEHDDNVYQVSKGGQGSLKSYQCSPQCAYRCSQTQYKKPCLFFCNKCCNACLCVPSGLYGNKGECPCYNNWKTKRGGPKCP

SEQ ID NO: 306 - protein, 94 aa, Oryza sativa
MKTRRAALLMLLLLVVVAAASWPQPCDAASGFCGSKCAVRCGRGRGRGSGCLRSCGLCCEECNCVPTGSGSTRDECPCYRDMLTAGPRKRPKCP

SEQ ID NO: 307 - protein, 102 aa, Oryza sativa
MRVPPLRATTALLATLLVAASFQDLTVAADGGGGVVPVPDSVCDAKCQKRCSLKVAGRCMGLCKMCCHDCGGCVPSGPYASKDECPCYRDMVSPKSRRPKCP

SEQ ID NO: 308 - protein, 92 aa, Oryza sativa
MASMAKSLLCISLVAILLLVETTAPHGQAYAIDCGAKCGYRCSKSGRPKMCLRACGTCCQCCGCVPPGTSGNENVCPCYANMTTHNGRHKCP

SEQ ID NO: 309 - protein, 84 aa, Oryza sativa
MAGGRGRGGGGGGGVAGGGNLRPWECSPKCAGRCSNTQYKKACLTFCNKCCAKCLCVPPGTYGNKGACPCYNNWKTKEGGPKCP

SEQ ID NO: 310 - protein, 93 aa, Oryza sativa
MKLNTTTTLALLLLLLLASSSLQVSMAGSDFCDGKCKVRCSKASRHDDCLKYCGVCCASCNCVPSGTAGNKDECPCYRDMTTGHGARKRPKCP

SEQ ID NO: 311 - protein, 102 aa, Populus trichocarpa
MKLSFAALLLLSVVLLSSFLRFTMAVPNHVASPPPPSPAIPSFCDPKCKARCAKAGYYQRCYDYCIICCKDCKCVPSGTYGNKSECPCYRDKLNSKGTSKCP

SEQ ID NO: 312 - protein, 101 aa, Populus trichocarpa
MAISKLLIASLLVSLLVLHLAEADQKVNSNQAASHVPGNNIDCGGACHARCSLSSRPRLCKRACGSCCARCKCVPQGTSGNLDTCPCYATLTTRGGRRKCP

SEQ ID NO: 313 - protein, 121 aa, Populus trichocarpa
  misc_feature (37)..(54): Xaa can be any naturally occurring amino acid
MDPETALELVKQGATLLLLDVPQYTLVGIDTQVLEIXXXXXXXXXXXXXXXXXXEATSLISPASTRCNYRCSATSHKKPCMFFCLKCCATCLCVPPGTYGNKETCPCYNNWKTKEGRPKCP

SEQ ID NO: 314 - protein, 39 aa, Populus trichocarpa
YCGICCEQCKCVPSGTYGNKHECPCYRDKRNSKGKPKCP

SEQ ID NO: 315 - protein, 100 aa, Populus trichocarpa
MSRKPSINANITEAPTPQPQPNTNSNRPPYGTTQGSLNPQECGPRCTGRCSKTAFKKPCMFFCQKCCAKCLCVPAGTYGNKQSCPCYNNWKTKRGGPKCP

SEQ ID NO: 316 - protein, 107 aa, Populus trichocarpa
MAKFVAVFLLALIAISMLQTLVVASHGRGGHHNNNKNKYGPGSLKSFQCPSQCTRRCSKTQYHKPCMFFCQKCCKKCLCVPPGYYGNKAVCPCYNNWKTKEGGPKCP

SEQ ID NO: 317 - protein, 95 aa, Populus trichocarpa
MAISKLLIASLVVSLLVLQQVNASPAAGSIPGKNIDCGGACKDRCSLSSRPHLCNRACGTCCARCKCVPKGTSGNLDTCPCYATMTTHGGRRKCP

SEQ ID NO: 318 - protein, 87 aa, Populus trichocarpa
MQAPSLFVFIYLVLEILIMLVISCGVAFCTKKCNTRCANAGIQDRCLKYCGICCEQCKCVPSGTYGNKHECPCYRDKRNSKGKPKCP

SEQ ID NO: 319 - protein, 113 aa, Populus trichocarpa
MGKSSIAIFLCSLLVLVLLGQNQALKTPISASQTQRQGNHAMYGATQGSLRPQECAPRCTTRCSATAYKKPCLFFCQKCCAKCLCVPPGTYGNKQSCPCYNNWKTKRGGPKCP

SEQ ID NO: 320 - protein, 245 aa, Populus trichocarpa
MAFKAVCLMVVAFVLVTAKASYMNEDFKEKAVFSKSVVPASTPAPPEVKSPTPAPPVVTPSTPLYKPPTPAPPVKTPPPAPPVNPPTPVKPPTTPAPPVYKPPSPAPPVNPPTPVKPPTTPAPPVYKPPSPAPPVNPPTPVPPVKPPTAPAPPVYKPPSPAPTPVPPVKPPTTGPMPPPVRTRSDCTPLCGQRCKLHSRKRLCVRACMTCCDRCKCVPPGTYGNREKCGKCYTDMTTRRNKPKCP

SEQ ID NO: 321 - protein, 66 aa, Populus trichocarpa
MDSIRYCGGLCKQRCSLHSRPNLCNRACGTCCVRCKCVPPGTSGNREVCGTCYTDMTTHGNKTKCP

SEQ ID NO: 322 - protein, 88 aa, Populus trichocarpa
MKPVFAAIFLLCLVFSSSLFEVTMAASGFCDSKCSVRCSKAGIKDRCLKYCGICCEKCKCVPSGTYGNKHECPCYRDMKNSKGKPKCP

SEQ ID NO: 323 - protein, 91 aa, Populus trichocarpa
MVSAKTTFILAILCLALMHELQIRTVEAGKINCKSKCEYRCSKASRHKMCIRACNTCCQRCNCVPPGTSGNEDTCPCYANMTTHGGRHKCP

SEQ ID NO: 324 - protein, 93 aa, Populus trichocarpa
MAVRSLLALMVFVFCLAELVVRGGNRRLMQDIDCGGLCKQRCSLHSRPNVCTRACGTCCVRCKCVPPGTSGNREVCGTCYTDMTTHGNKTKCP

SEQ ID NO: 325 - protein, 95 aa, Populus trichocarpa
MASLSRNSLLVVLSLCLLITFSNVAEIHGAKLRPSECKPRCNYRCSATSHKKPCMFFCLKCCATCLCVPPGTYGNKETCPCYNNWKTKEGRPKCP

SEQ ID NO: 326 - protein, 68 aa, Populus trichocarpa
MLIWFRFSDCGSACKARCQLSSRPRLCKRACGTCCSRCSCVPPGTAGNYEACPCYASLTTHGGRRKCP

SEQ ID NO: 327 - protein, 87 aa, Populus trichocarpa
MQITFWMQMDEESDVVAIDKKHYPKRINCGYLCARRCRASSRKNVCHRACKTCCNRCRCVPPGTYGNKSACPCYASLRTHGNKPKCP

SEQ ID NO: 328 - protein, 65 aa, Solanum_lycopersicum
MAGSYFCDSKCKLRCSKAGLADRCLKYCGICCEECKCVPSGTYGNKHECPCYRDKKNSKGKSKCP

SEQ ID NO: 329 - protein, 146 aa, Solanum_lycopersicum
MAMALRVLLLLVLFFLTVKAQDSIIDLKEVEEDKQQHVGLSQALRVFTRGANRRLVQDIVLKVAKYLNNGDIALAPAPAPPPSPLDCGGLCKYRCSLHSRPNVCFRACGTCCVRCKCVPPGTFGNREKCGKCYTEMTTHGNKTKCP

SEQ ID NO: 330 - protein, 104 aa, Solanum_lycopersicum
MAISKALFASLLLSLLLLEQVQSIQTDQVSSNAISEGADSYKKIDCGGACAARCRLSSRPRLCHRACGTCCARCNCVPPGTSGNTETCPCYASLTTHGNKRKCP

SEQ ID NO: 331 - protein, 81 aa, Solanum_lycopersicum
MFLILLTFSNVVEGYNKLRPTDCKPRCTYRCSATSHKKPCMFFCQKCCATCLCVPKGVYGNKQSCPCYNNWKTQEGKPKCP

SEQ ID NO: 332 - protein, 112 aa, Solanum_lycopersicum
MAGKMSIVLFVLLVVFLTQNQVSRANIMRDEQQQQQRNNQLYGVSEGRLHPQDCQPKCTYRCSKTSYKKPCMFFCQKCCAKCLCVPAGTYGNKQSCPCYNNWKTKRGGPKCP

SEQ ID NO: 333 - protein, 112 aa, Solanum_lycopersicum
MAISKFLLVTMVLISLLVFRPVEANGNGDGDNLAVHTAGPEGANNPTYIPTSECGTACEARCSLASRHKMCLRACGTCCTRCNCVPPGTSGNQDLCPCYRDMLTHHGKHKCP

SEQ ID NO: 334 - protein, 96 aa, Solanum_lycopersicum
MAKSGYNASFLLLISMFLILLTFSNVVEGYNKLRPTDCKPRCTYRCSATSHKKPCMFFCQKCCATCLCVPKGVYGNKQSCPCYNNWKTQEGKPKCP

SEQ ID NO: 335 - protein, 102 aa, Solanum_lycopersicum
MTVQKAFVAMLIASFLLVHFANAQKVDYSKPPASAPQGPQPLDCIGACKYRCSESSRQNLCNRACGSCCHRCHCVPPGTSGNYESCPCYFNLTTHNTTRKCP

SEQ ID NO: 336 - protein, 104 aa, Solanum_lycopersicum
MAKIVSVLLLALLVISMLANTVMAANGKHHHYAKKYGPGSLKPSQCLPQCTRRCSKTQYHKPCMFFCQKCCNKCLCVPPGTYGNKAVCPCYNNWKTKEGGPKCP

SEQ ID NO: 337 - protein, 72 aa, Solanum_lycopersicum
MVLVRGRPPSSRLSTKMHRTRCSKTSYKKPCMFFCQKCCAKCLCVPAGTYGNKQSCPCYNNWKTKRGGPKCP

SEQ ID NO: 338 - protein, 114 aa, Solanum_lycopersicum; identical to SEQ ID NO: 276

SEQ ID NO: 339 - protein, 103 aa, Solanum_lycopersicum
MASLKGFAALLIASLVLVHFTYALQEVISGKPPAPSPQPPKPIDCTGSCKTRCSKSSRQNLCNRACGSCCRTCHCVPPGTSGNYEACPCYFNLTTHNSTRKCP

SEQ ID NO: 340 - protein, 103 aa, Solanum_lycopersicum
MKIFTLFLIFILLIQVFANAATEQIEAGNEGALHKKIHPIKRIHCGYACARRCKKSSRKKVCMRACKTCCARCKCVPPGTYGNKEVCPCYARLRTHGNKPKCP

SEQ ID NO: 341 - protein, 94 aa, Solanum_lycopersicum
MRLLHIFLALLIMASMSRAQPPVGPTTCPVPKDKCEEACNVRCSQKGHKKRCLFYCNHCCGWCQCVPPGYVGENKDCCPCYRDWKKQTGEPKCP

SEQ ID NO: 342 - protein, 56 aa, Solanum_lycopersicum
MDINGSHKGHKKRCLFYCNHCCGWCQCVPPGYVGQNKGCCSCYNNWKTQIGGPKCP

SEQ ID NO: 343 - protein, 116 aa, Triticum_aestivum
  misc_feature (63)..(63): Xaa can be any naturally occurring amino acid
  misc_feature (93)..(93): Xaa can be any naturally occurring amino acid
  misc_feature (103)..(103): Xaa can be any naturally occurring amino acid
MAKISFLLVALLVLAVAFPVEVMGGGNGGAGGGGKLKPWECSSKCSSRCSGTQYKKACLTYCXKCCATCLCVPPGNYGNKGAWPCYNNWEEQXREGPKCPRIXEFPSSSSGGATCG

SEQ ID NO: 344 - protein, 201 aa, Triticum_aestivum
  misc_feature (7)..(8): Xaa can be any naturally occurring amino acid
  misc_feature (13)..(13): Xaa can be any naturally occurring amino acid
  misc_feature (17)..(17): Xaa can be any naturally occurring amino acid
  misc_feature (25)..(26): Xaa can be any naturally occurring amino acid
MYVGFNXXWRFTXNDKXHIINVKAXXCHICSNQNKELPAPKSSNDDFTLSLCDISMQGTGSRNQTRELRCIFTSPQPNKRLLLPNISWTKLKKRRTAMKPLPVTLALLALFLAASYQDLAVAAADADADGVGSGAPVLDSVCEGKCKNRCSQKVAGRCMGLCMMCCGKCAGCVPSGPLAPKDECPCYRDMKSPKSGRPKCP

SEQ ID NO: 345 - protein, 92 aa, Triticum_aestivum
MAGQARAFMCVALVVLLLLVETTAPSGQAHAVDCGSACSYRCSKSSRPNLCNRACNTCCRRCDCVPPGTAGNEDVCPCYAHMTTHDGRHKCP

SEQ ID NO: 346 - protein, 103 aa, Triticum_aestivum
MACVARTLSIPFLLALFFVAEVSGSMNVESYKPAGAEGSVPLKECPAKCKIRCSATSHKKPCNFYCNYCCKRCLCVPSGTVGNKEECPCYNNLKTQDGKPKCP

SEQ ID NO: 347 - protein, 94 aa, Triticum_aestivum
MKLGPTATTVALLLVLLLASSSLRAATAGSAFCDGKCGVRCSKASRHDDCLKYCGICCAECNCVPSGTAGNKDECPCYRDKTTGHGARKRPKCP

SEQ ID NO: 348 - protein, 114 aa, Triticum_aestivum
MVTKVICFLVLASVLLAVAFPVSALRQQVKKGGGGEGGGGGSVSGSGGGNLNPWECSPKCGSRCSKTQYRKACLTLCNKCCAKCLCVPPGFYGNKGACPCYNNWENKEGGPKCP

SEQ ID NO: 349 - protein, 101 aa, Triticum_aestivum
MAKISFLLVALLVLAVGFPVEVMGGGGGGGGGGGGGNLKPWECSSKCSSRCSGTQYKKACLTYCNKCCATCLCVPPGTYGNKGACPCYNNWKTKEGGPKCP

SEQ ID NO: 350 - protein, 94 aa, Triticum_aestivum
MKLGPTATTVALLLVLLLASSSLRAATGGSAFCDGKCGVRCSKASRHDDCLKYCGICCAECNCVPSGTAGNKDECPCYRDKTTGHGARKRPKCP

SEQ ID NO: 351 - protein, 113 aa, Triticum_aestivum
  misc_feature (80)..(80): Xaa can be any naturally occurring amino acid
  misc_feature (102)..(102): Xaa can be any naturally occurring amino acid
MKKLRTTTLALLLLLVFLAASSLRAAMAGSAFCDGKCGVRCSKASRHDDCLKYCGICCAECNCVPSGTAGNKDECPCYRXKNNGQGARKEGQVPKIRQQSPXIDSPTPMGSKQ

SEQ ID NO: 352 - protein, 128 aa, Triticum_aestivum
  misc_feature (116)..(116): Xaa can be any naturally occurring amino acid
MKKLRTTTLALLLLLVFLAASSLRAAMAGSAFCDGKCGVRCSKAGRHDDCLKYCGICCAECNCVPSGTAGNKDECPCYRDKNNGHGARKEGQMPMIRQHSPSIDSPTAMGSKKHIXLKLHATLSNQVL

SEQ ID NO: 353 - protein, 94 aa, Triticum_aestivum
  misc_feature (26)..(28): Xaa can be any naturally occurring amino acid
MAKISFLFVALLVLAVAFPVKVMGVXXXGKLKPWECPSKCSSRCSGTQYKKACLTYCNKCCATCLCVPPGTYGNKGACPCYNNWKTKEGGPKCP

SEQ ID NO: 354 - protein, 98 aa, Triticum_aestivum
MKKLRTTTATTTLALILLLVLIAATSLRVAMAGSAFCDSKCGVRCSKTGRHDDCLKYCGICCAECNCVPSGTAGNKDECPCYRDKTTGHGARTRPKCP

SEQ ID NO: 355 - protein, 92 aa, Triticum_aestivum
MAGKARVFMCVALVVLLLLVETTAPSGQAHAVDCGSACSYRCSKSSRPNLCNRACNTCCRRCDCVPPGTAGNEDVCPCYAHMTTHDGRHKCP

SEQ ID NO: 356 - protein, 107 aa, Triticum_aestivum
MKPLPVTLALLALFLVASYQDLTVAADADADAAGAGDVGAVPVPDSVCEGKCKNRCSQKVAGRCMGLCMMCCGKCAGCVPSGPLAPKDECPCYRDMKSPKSGRPKCP

SEQ ID NO: 357 - protein, 117 aa, Triticum_aestivum
MAPGKQLLPPLLLLMLLHHQPAAGASDPPVTHGGMRASTARSLLQQQQQQQPPRLDCPKVCLGRCANNWRNEMCNDKCNVCCQRCNCVPPGTGQDTRHICPCYDRMTNPHNGKLKCP

SEQ ID NO: 358 - protein, 98 aa, Triticum_aestivum
MKKLHTTTATTTLALLLLLVLLAATSLRVAMAGSAFCDSKCGVRCSKASRHDDCLKYCGICCAECNCVPSGTAGNKDECPCYRDKTTGHGARTRPKCP

SEQ ID NO: 359 - protein, 99 aa, Triticum_aestivum
MAKISFLLVALLVLAVAFPVEVMGGGNGGAGGGGKLKPWECSSKCSSRCSGTQYKKACLTYCNKCCATCLCVPPGTYGNKGACPCYNNWKTKEGGPKCP

SEQ ID NO: 360 - protein, 129 aa, Triticum_aestivum
MAPTQQRLLTRRRLLPPLLLLLLLAAHLQPAAASSSASDPLVTTTTAHGSMRASSRSLLQQQPPPRLDCPKVCLGRCANNWKNEMCNDKCNVCCQRCNCVPPGTGQDTRHICPCYDQMTNPHNGKLKCP

SEQ ID NO: 361 - DNA, 270 bp, Populus thrichocarpa
atgaagaagctcttctttgttactttgctgttgtgttcactcctcttcagctcgtctttcttggaacctgtcatgactaagtcatctttctgtgccaagaagtgcgatacgaggtgcgcaaacgctggcatacaggataggtgcttgaagtactgtggaatatgctgcgaacagtgcaagtgtgtgccctctggaacttatgggaacaagcatgagtgcccttgttacagggacaagaggaactccaagggcaagcccaagtgtccttaa

SEQ ID NO: 362 - DNA, 569 bp, Medicago truncatula
atggagaggaaaataacattgctgattttgatggttgcattgctcttctgcatgactaaggtattatgtgctgattctagtgtccacattcaagaccaatttactcattttgaggtggtaaaaggacctaatagaaggcttttggcatttgtggattgtggaacaaggtgcaatgtgaggtgcagtgtgcattcaagaccaaatgtttgtatgagagcttgtggaacatgttgtttaaggtgcaagtgtgttcctccaggcacttacggcaacagagaaatgtgtgggaggtgttacactgatatgattacacgtggcaacaagcccaagtgcccctaattcaacttgtccaagcttaaattagaattccccttatgtttttttgtctttattttgtttctagcattatgtatgagtttgtctattaatttgtgagttagttatccttaatgagtaagacgtggaataaacaactacattttttgcttaatgagtttgtgtatcagatgaaaatatataatcactattagttgtattttgtgattatttattacgagaaacaattgatt

SEQ ID NO: 363 - DNA, 321 bp, Arabidopsis thaliana
atgatgaagctcatagttgtctttgttatatccagtttgttgtttgctactcaattttctaatggtgatgaattagagagtcaagctcaagcacctgcaatccataagaatggaggagaaggctcacttaaaccagaagaatgtccaaaggcatgtgaatatcgatgttcggcgacatctcacaggaaaccatgtttgtttttttgcaacaaatgttgtaacaaatgtttgtgtgtaccatcgggaacatatggacacaaagaagaatgtccttgctacaataattggacgaccaaagaaggtggaccaaaatgtccatga

SEQ ID NO: 364 - DNA, 294 bp, Arabidopsis thaliana
atggcgaattgtatcagaagaaatgctcttttcttcttgactcttctctttttattgtcagtctccaacctcgttcaggctgctcgtggtggtggcaaactcaaaccccaacagtgcaactcaaagtgtagcttccgttgttcagcaacatcacacaagaagccatgcatgttcttttgcctcaagtgttgcaaaaaatgtctttgtgttcctcctggcactttcggcaacaaacaaacttgtccatgttacaacaactggaagactaaagaaggccgtccaaaatgtccttaa

SEQ ID NO: 365 - DNA, 321 bp, Arabidopsis thaliana
atggctaagtcatatggagctatcttcctcttgaccctcattgtcctcttcatgcttcaaaccatggttatggcctcaagtggatctaatgtgaagtggagccagaaacgttatggaccaggaagcctgaaacgtacccaatgcccatcggaatgtgataggaggtgtaaaaagacacagtaccacaaggcttgcattacgttctgcaacaaatgctgcaggaagtgtctctgtgtgcctccgggttactatgggaacaaacaagtttgctcctgctacaacaactggaaaactcaagagggtggaccaaaatgcccttga

SEQ ID NO: 366 - DNA, 306 bp, Arabidopsis thaliana
atggccaaactcataacttcttttctcttactcacaattttattcactttcgtttgtctcactatgtcaaaagaagctgagtaccatccagaaagttatggaccaggaagtctgaaatcataccaatgtggaggacaatgcacaaggagatgtagcaacacaaagtatcataagccatgcatgttcttctgccaaaagtgttgtgctaaatgcctttgtgtccctccaggcacgtacggcaacaaacaagtgtgtccttgttacaacaactggaagactcaacaaggtggaccaaaatgtccataa

SEQ ID NO: 367 - DNA, 750 bp, Allium_cepa
cttctgctagttgttgctcttttagcaattatgcttgttgaatccgctaagaatggatatggacaaggaagccttcgaagctatcaatgttctggtcaatgcgcaagaagatgctcaaagacacagtacagaaagccgtgccttttcttctgcaacaaatgctgtgcaaagtgcttatgtgtgcctcctggtttctatggcaacaaaggagtctgcccatgctacaacaactggaaaactcagcaaggaggacccaaatgcccttaattatttatctacttatctacacatatggttatatttatatatctatgcatcggtcttcaccataactatttatattgttatgttgttgttacttgcttgattaatttatttactaagtgtggcaactgttgttattgcccctaattaattacttatgtatcattgaaggaaagcactagttggtgtatgtgtcttttgaatctaatggaaatttttatttgggaattccagcaagagttgccgcccagatcaacaggccagtcgttcctccagcgtaaacatcaccattagctgcccattcttctggtgtgtagattgggctgtagccatcaacatttgcaccatatttgtcagcatattggtaaactccctttcccttgggtttcctccctgatgcatcaacaccatttctcaagttcatcccacctccagttccataaggggtgtcggtcttgatcttcttgactccgctagccttaacgc

SEQ ID NO: 368 - DNA, 568 bp, Allium_cepa
ctcctccaaccgtctccttctacaataaatttccaagtcatggcaaatagtacatgcattctgcttctttctcttcacttgttacttatcatagccaccgcaatccaggtaaagcatgctcatgcaccaactctacaaccagtgaactctacagctccaactgctcaacccaattatccttcgcatggattcactgaaggaagccttcaaccacaagaatgtggagggcggtgtgatgtacgatgctcagcgacacagtacaggaagccatgtatgttcttttgccagaaatgctgtgcaacttgccgctgtgtgccttctggtacttacggcaataagcagacttgcccttgctacaataattggaagactaaacgaggaggacccaaatgcccctgaaccttctgttttcctttcccttcctttgtccatctcatctgctctttctgtatatttgggtgaagcatgattgttccttttgtaccttaaatcgtaggttttatctttttgcaatgtcatcttattgtatgcatgtgtttccacagaaataaaacttaaattccgcttt

SEQ ID NO: 369 - DNA, 948 bp, Allium_cepa
ccacattttcccactatttaaattccaacccctctctttatcctctcttcctacttctctgtcgataatatcatcaaacagttcaatggcagccgccgcatcttccctctccctcctcccctcctcttcctcctcctccacccggtcttccgcccttcgatcctccctccgccctacccgccgcctctctttctcctcttccgccgccgattacagcctctctcttcacgtctcatccaaggcccgggctttttccacgcacctgaccaaaggtccgaggggcgtcgtctccatggccaaaaggagcgttggtgacttgagcgccgccgaattgaagggaaagaaggtgtttgtcagggctgacttgaatgtgccccttgacgataaccagaatatcactgatgatactaggattcgtgctgctgtgcctactatcaagtatttgatgagcaatggggctaaagttattttgtctagtcacttgggacgtcctaagggtgttacacctaaatacagcttggcacctcttgtaccaagactatctgaacttctaggcatcacggttgagaaagcagatgactgcattggcccagatgttgaggctaaggttgcagcacttccagaaggtggcgtgcttcttctagaaaatgttaggttttacaaagaagaagagaagaatgatccagaatttgcaaagaaacttgcttcacttgctgatctttacgtgaatgatgcatttggtactgctcacagggctcatgcatctactgagggagtaaccaagtttttgaggccatctgttgctggtttccttttacaaaggaaacttgataaccttgtgggagcagtttcatcccccgaagaggcatttgctgcaatagtgggtggatccaaggtgtcatccaagaatgggtgtgattgagtcgctattagagaaatgtgatattc

SEQ ID NO: 370 - DNA, 1086 bp, Oryza_sativa
atttcggtgctttcggctggctgcacagcacagccacaggagagctagctctcatcacgggccaaatccaagggggatatcgtatttcctgtgcatcgatcgtttgctcattcacgagctcacagactcagagtctcacagggagatcaaggagtcggagaaacctcctctgccttgcatgccagtgagtgagtgcgagagataggttcacttcagggtggttattggggtgagcacctgagctgatcagcagccatggagggcgtcggtgttggggttagaattagagcgctgctctgctgcattgcgatggcggcgatgcttctcagttcctaccagcaaggccaggccgaggcctcttacatgccatggccgccagctacgccgccgccacctgctgctgccgctgccaactccacctccaccgcggcggcgaacaactcgtcgtcgtcgtcgtccaccaccgcgccgccgcagcagccgaccgccttccccatgtacggcgtgacccccggcagcctccggccgcaagagtgcgggggtcggtgcgcgtacaggtgctcggcgacggcgtacaggaagccgtgcatgttcttctgccagaagtgctgcgcctcctgcctctgcgtgctgccggggacctacggcaacaagcagtcgtgcccctgctacaacgattggaagaccaagcgaggaggccccaagtgcccctagttaattcttttttttttcattttagcagcaaattaaaccaccattgttgagggagggagggagggagggaggaaggaagccgccatggctgcaagcttttcagcctttgctctgagctaaggcacggccctcatgcatccagagtttgttgaaattcagatgcgactctctgtgttcttttcctcttgttttttttttctgttctttttggggtatctctgctagagtggttgtttgtctgtattgatttcgtggatcttaaggtagaagatgagttgtcgagatgaattttgatcgtgatgtgtttcgagtttgtttgtaatttgtatgcagtattgaggagtaatttgtatgctactatgggttcttttc

SEQ ID NO: 371 - DNA, 666 bp, Oryza_sativa
caatcactcaaggcccctcctcctctctccatcaagagaagctctacctcggcccgtcctcgcccgccggccggccgccgtcgccatggctcccggcaagctcgcggtgttcgccctcctggcgtctctcctcctcctcaacaccatcaaggccgcagactaccctccggctcctccccttgggccgcctccccacaagatcgtagaccccggcaaagactgcgtgggggcgtgcgacgcgcggtgcagcgagcactcgcacaagaagcggtgcagccgctcctgcctcacgtgctgcagcgcgtgccgctgcgtcccggcgggcacggccggcaaccgggagacctgcggcaggtgctacaccgactgggtctcgcacaacaacatgaccaagtgcccgtgagctaagcgcgcacgaatacgatccgtctgcctgcctagatctagcttaatttagctttgcattgctcctagttgagtagttggtgttgtccgttgggtttctgtctttccagagttatccttttttctttttctttttttttcttcctgagagaagagagggtgttgacgagctgttactgttagtattctggacctctagtatgttttgttgtgtaaaaaaggactagtgaaatccatctcggcttgaatcacgcttgatat

SEQ ID NO: 372 - DNA, 354 bp, Oryza_sativa
atggatccagcatcacgctccctctccattattttcttcttagtcgcagtgacatttgtggttgaggtgtctgggcagaagaatgaagcagtataccatttgtttggtggtgaaggctcgctcaccaaaaatgagtgcccagggaaatgcagctaccgttgctcggccacatctcacacgacggtgtgcatgacatactgcaactactgctgcgagaggtgcctgtgtgttccatccggtacatacgggaacaaggaagaatgcccttgctacaacaacatgaaaacccaggaaggcaaaccaaatgtctgtgaactggggatagaagagaaaagaaatgatacaggggaatag

SEQ ID NO: 373 - DNA, 759 bp, Oryza_sativa
aaaaaaaaaaaaaaaaaaaaaaaaaaaaaaaaaaaaaaaaaaaaaaaaaaaaaaaaaaaaaaaaaaaaaaaaaaatggacactctccacaacaccccaactctgaagctgcttgcttggagtctaggaccagcattcacaagcacaatgaagctcaacaccaccaccaccctggctctcctcctgctcctgctcttggcctcctcttccctccaagtttccatggctggatcagatttctgcgacggcaagtgcaaggtgaggtgctcgaaggcgagcaggcacgacgactgcctcaagtactgcggcgtgtgctgcgcctcctgcaactgcgtgccgtcggggacggccggcaacaaggacgagtgcccctgctaccgcgacatgaccaccggccatggcgctcgcaagaggcccaagtgcccatgatcatttttgcattatgcatgctacatgatgcttagccatcatccgtagttgctttgcatgcatgatgcatgctcatgatcgagatggagtagtagatatatgcatatgcttgccatgatcgatcgtatggaccatgcaaagtatgcttgtttgtgtgaggatcgactcgatcttgagtctttccatgttcttggttttctttttttactgctagttaattactatggagtacatgtgaatatgacatcggatatgtaatgtatacatgcatgcctggtgataataatggtgtgtgtgctgtaataaagtgttggcttaattggtgtagtac

SEQ ID NO: 374 - DNA, 279 bp, Oryza_sativa
atggccagtatggccaagtcgctcttgtgcatctcgctcgtcgccatcctgctcctcgtcgagactactgctccacatggacaagcttacgccatcgattgcggggcgaagtgcgggtaccggtgcagcaagtcggggcggccgaagatgtgcctgagagcatgcggcacctgctgccagcgctgcggctgcgtgccgccgggcacctccggcaacgagaacgtctgcccctgctacgccaacatgaccacccacaacggccgccacaagtgcccttga

SEQ ID NO: 375 - DNA, 696 bp, Oryza_sativa
aaactcgtcttggaacccactgctttgcctataaatatgtagctatagcttctctgctttccgtcgcttaacacagttaacaccaacgcagtggtgctctctcttcagttagtggagcttcagagaaatggctttggctggtaggctacttgtcctcttcgccattgctctccttgccatctccatagccgagcacaaggcgctagccaagggatcaaccagtgagcatgatgataacgtttaccaagtaagcaagggaggacagggcagcctgaagagctatcagtgctcgccgcagtgcgcgtaccggtgcagccagacgcagtacaagaagccgtgcctcttcttctgcaacaagtgctgcaacgcctgcctctgcgtgccgtcgggcctctacggcaacaagggcgagtgcccctgctacaacaactggaagaccaagcgcggcggccccaagtgcccgtgaaaaaaccttcagtggacgctcgaattctttggtcatttcagtacccaaactctgctcgcacgatgccgattgattctagcatggccgtcggggcagaggcagctgtggcttcctatacattacatacacacggttgtaaaaatgtacatctgggctatccattgctgtacgcctgaacggttccagaggggtgatgcaaatcatgcagatgcagctgtatcgctaccacg

SEQ ID NO: 376 - DNA, 772 bp, Oryza_sativa
gcatatttgctttgctccccttccacgactttagccatcttggcttgcaaggtgagaagagcagatcgatcgagctgagagctggtctcaggtgtgtgttgcgtgagtgtgttcgaagacgaacgatgaagacccgccgggccgcgctgctaatgcttctcctcctggtggtggtggcggccgcctcgtggccgcagccttgcgacgctgcttcagggttctgcgggagcaagtgcgcggtgcggtgcgggagggggagggggcgggggagcgggtgcctgaggtcgtgcgggctgtgctgcgaggagtgcaactgcgtgcccacggggagtgggtcgacgcgcgacgagtgcccctgctaccgcgacatgctcaccgccggccccaggaagaggcccaagtgcccctgaatcctccccatccatctccatctcatcgattaccatcaacttcatctcattttcttgtacttgaaattagctactagtacgtggttgtgtatacgtcgcaggtgtgtatgtatgtatgtatatatatgcgtatgttgtcatgctgcgtagttatagttagtagtcctacctactccagtacgtacgtgttgatgcctgttaatatggctgtatggctagctaagctgtgtgcctgtgtcgatttgtaaagttgtactagtaggtagttgtactacttgcagcgcacgtactgtttgtttgtctgttgttaaatttcgtgttaactatgaacaggggatatgccgtatgcgctttacctgagg

SEQ ID NO: 377 - DNA, 2054 bp, Oryza_sativa
acagctcactacctatccatctaaaatctgattacacatttgcccattaaattctactatgcacaacaagaagccacgaattctactatgcacaacaagaagccacgactgtgctcttaattcaaatctgaatttgttaggacatattattgacgtataaccacataaataaatccaaagtatatataatatttttgtttccccatttcaaggtctatatgatcttacttatttggttttggtccgcatactggtagtatgcctgagagtggttatattgatgactgttaagagaatgacaagtcaatatcttgctttgatacctttttttttgcatttttgatttagctaaaaataactatgtactgataatggttatttttattgttacaaattccaattacatgaggatatgttttataaattttgggtaaataggttgtgcttcagaaggtgtagtttctaaaatttttagtgcaattatgtactcgggcgatatattttgtcaaaaaacgtgcattgcacgtgagtattagtagtgtgttactgtgttacagtccattgcatagaccattgggcacacacacgctgataagcacaagatccaaaagcaagtaaccgcccatggtatactatgcatgtacgaggccgacaaaagggaaagcaagccggtgatgcgcgtgaacactgcggcatagcgacaaggccacctgtccgccatggcattcatgattcatggccgtccctccccctgcgagattcccccactcacttgctcacacaccaaagaagctactggggcaggtgtgtccattgaattgaattgaattgaaactattgatgaatgaattcaccagccagctagaaccttccttgaaaccagccataaatcacacccattcatctctctcaactctctgcagcccattcactgcaccagtgtagtagcagtgctgcagttgctttgaacactcatctcctcaccgtgtttgttagagctcaaaaggatcaagagaagatgagggttcctcctcttcgtgccaccacggctctcctggccaccctcctggtcgccgcctcgttccaggatctcaccgtcgctgcagacggcggcggcggcgtggttccggtcccggatagcgtgtgcgacgccaagtgccagaagcggtgctcgctgaaggtggccgggcggtgcatggggctgtgcaagatgtgctgccacgactgcggcggctgcgtgccgtcggggccgtacgccagcaaggacgagtgcccctgctaccgcgacatggtctcccccaagagccgacggcccaagtgcccgtgagcaacgagagatggctggcactgtgacgatgtgtagccgatccgtggtagtagtgtgattgatagcgttgggatcgatctcggttctttgagaagtgttagtgcttagtggaataaaacaagaatgtctgtctaagatatgtcttgtgctttgtccagagtatgctctgatatcgctctgatatctaggccgagtttagttccaaattttttcttcaaactttcaacttttttatcacatcaaaactttcctacaacacaaatttctaatttttccattatatcgttccaatttcaaccaaatttccaattttagcgtgaactaaacacacaagttacttttgattattttttttaagcaacagaattgagaatgagggtgtgtttagttcacgctaaaattgaaagttttattgagattggaacgatgtaacggaaaagttagaagtttatgtatatagaaaattaaagttctgatgtgatggaaaacttggaggtttaaagaaaaagttgggaactaaaccagacctggatcatctggctcgagcaggggcggagctagtatatattaggggggtgcccagaaacctggtcaagaaaattttttagctatacctcatctattttcatcatgtatgtaccctctaaatacaaacttaggcatccgcatcagcttaaacttgatctaaagtagagtaaattaaacaagtgacaccaccatctatttc

SEQ ID NO: 378 - DNA, 1012 bp, Oryza_sativa
cgtgccggcgacgcatcattcaaatttctgccctatcaactttcgatggtaggataggggcctaccatggtggtgacgggtgacggagaattagggttcgattccggagagggagcctgagaaacggctaccacatccaaggaaggcagcaggcgcgcaaattacccaatcctgacacggggaggtagtgacaataaataacaataccgggcgctttagtgtctggtaattggaatgagtacaatctaaatcccttaacgaggatccattggagggcaagtctggtgccagcagccgcggtaattccagctccaatagcgtatatttaagttgttgcagttaaaaagctcgatcacctccacctcgcaaacagaaccagtactttaatttcaccttgcaaattcagttgaattcggctcgttcaggttcagtcgtttgatcatcatggctagtatggccaagtcgctcttgtgcatctcgctcgtcgccatcctgctcctcgtcgagactactgctccacatggacaagcttacgccatcgattgcggggcgaagtgcgggtaccggtgcagcaagtcggggcggccgaagatgtgcctgagagcatgcggcacctgctgccagtgctgcggctgcgtgccgccgggcacctccggcaacgagaacgtctgcccctgctacgccaacatgaccacccacaacggccgccacaagtgcccttgatcatctcgaccaatatatcaccgctcgatcaccgcgccgccgctttgctatccaaccgaccggtgatgatacatggcggcaaccttgtgatgatcctagctagctagatgtgctacctacttcgtgcctgcatgcatgtagcttgcatatgcatgctagttttgctatatcgcgtatttgctacttggaatatgtatgatgtgtgtgcatatatatgtggcgtgtcgtgatcgatcgatcgatcgaccgtgtacgagcaaataagtaatataatgaagtatttgctttt

SEQ ID NO: 379 - DNA, 433 bp, Oryza_sativa
acaatctctctaacctctccttcaacctgattactatatatcttgaatcttgggttaatcttgacgttcttgttcgttcttgtttctcgcgtgcaggaggtgatggcaggagggcgcgggcgcggcggcggcggcggcggaggggtggccggcggcgggaacctgaggccgtgggagtgctcgcccaagtgcgcggggaggtgctccaacacgcagtacaagaaggcgtgcctgacgttctgcaacaagtgctgcgccaagtgcctgtgcgtgccgcccggcacctacggcaacaagggcgcctgcccctgctacaacaactggaagaccaaggaaggcggccccaagtgcccctaagatgcatgcctttttttctttcttcttttttttttgtttttttaccgtatgattaatacctcctactagttctact

SEQ ID NO: 380 - DNA, 698 bp, Oryza_sativa
actctccacaacaccccaactctgaagctgcttgcttggagtctaggaccagcattcacaagcacaatgaagctcaacaccaccaccaccctggctctcctcctgctcctgctcttggcctcctcttccctccaagtttccatggctggatcagatttctgcgacggcaagtgcaaggtgaggtgctcgaaggcgagcaggcacgacgactgcctcaagtactgcggcgtgtgctgcgcctcctgcaactgcgtgccgtcggggacggccggcaacaaggacgagtgcccctgctaccgcgacatgaccaccggccatggcgctcgcaagaggcccaagtgcccatgatcatttttgcattatgcatgctacatgatgcttagccatcatccgtagttgctttgcatgcatgatgcatgctcatgatcgagatggagtagtagatatatgcatatgcttgccatgatcgatcgtatggaccatgcaaagtatgcttgtttgtgtgaggatcgactcgatcttgagtctttccatgttcttggttttctttttttactgctagttaattactatggagtacatgtgaatatgacatcggatatgtaatgtatacatgcatgcctggtgataataatggtgtgtgtgctgtaataaagtgttggcttaattggtgtagtacatgttcagtttagtgtgcc

SEQ ID NO: 381 - DNA, 419 bp, Populus trichocarpa
ctgcaaatcaagccttgctgatataaaaaaatgaagctctcttttgcagcactgctgctactttcagtggtcctcctgtcctctttccttcggttcaccatggctgtgcccaaccacgtcgcgtcacctccacctccctccccagcaattccaagtttctgtgatccaaagtgcaaggctaggtgtgccaaggcgggatactaccaacgctgctatgactactgtataatctgctgcaaagattgcaagtgtgtgccttcagggacttacggaaacaagtcagaatgtccatgctacagagacaagttgaactcaaagggcacctccaaatgcccttaagaaatccattatcccaacctttattttcccttttcactcaataaaatgcaacaacttgtacttagacatttccaaaaact

SEQ ID NO: 382 - DNA, 416 bp, Populus trichocarpa
agtctccaagggtctaattaagctttatcaatggctatttcaaagcttttgattgcttccctgctcgtatctcttcttgtgctccatcttgccgaagctgatcagaaggtgaactcaaatcaagctgcaagccatgttcctggaaacaatatcgactgtggtggcgcttgccatgctaggtgttcgttgtcctctaggcctcgtctttgcaagagggcttgcgggtcatgctgtgcccgatgcaaatgtgtccctcaaggcacttccggcaacctggatacctgcccttgctatgccaccttgactactcgtggaggcagacgcaagtgtccttgaaattagtcagccaattagcccatcagtaaaatcaacgcattctctacatgtatcaataattaataaccattggagttcca

SEQ ID NO: 383 - DNA, 476 bp, Populus trichocarpa
  misc_feature (141)..(190): n is a, c, g, or t
ctaaaaacaatctcttaaaaataggtagccatggatccagagacggcgttagagctggtaaagcaaggagccacactcctcctcctcgacgtccctcagtacactcttgtcggcattgacactcaggtactagagattttnnnnnnnnnnnnnnnnnnnnnnnnnnnnnnnnnnnnnnnnnnnnnnnnnnaagaagctacttcactcatctccccggcaagcaccagatgtaattaccgctgctcagcaacatcacacaagaagccatgcatgttcttctgtctgaaatgctgtgcgacatgcctctgtgttcctcctgggacttatggcaacaaggaaacatgcccttgctataataactggaagaccaaggaaggaagacccaagtgcccttgacctcgaggcttagctagttagctaccttcgatcaaaaactaaagacaataaaaatagacgcctagaatcccattctcatt

SEQ ID NO: 384 - DNA, 323 bp, Populus trichocarpa
ttatcatccttgcttgaggcaaaacaaaagatgaagaagctcttctttgctactttgctgttgtgttcactcctcttcagctcgtctttcttggaacctgtcatggctaatactgtggaatatgctgcgaacagtgcaagtgtgtgccctctggaacttatgggaacaagcatgagtgcccttgttacagggacaagaggaactccaagggcaagcccaagtgtccttaaatcaacctcttagacagtcaagatgtgcatgtgttgagaaagatatcatgtatatgagctagcagtactgtaacagttctcgagactcgaata

SEQ ID NO: 385 - DNA, 413 bp, Populus trichocarpa
gttacagtagctctctctgcttacaacaagatgtcgaggaagccaagcattaatgctaacatcacagaggctccaacccctcagccccaaccaaatacaaatagcaaccgtccaccgtatggcaccactcaagggagccttaatcctcaagagtgcggacctcgttgcactggtagatgctccaagacagccttcaagaagccatgcatgttcttctgccaaaagtgctgtgccaagtgcttgtgtgtgcctgctggaacttatgggaacaagcaatcttgtccctgctacaacaactggaagaccaagaggggaggccccaagtgcccttgaagacctaattaatcgattatctctctcccttttctgcctcaatgtagcttcctctgttcatttatattgttccaactggg

SEQ ID NO: 386 - DNA, 434 bp, Populus trichocarpa
gaagaagggttttgccttgtagctaaggccatggctaagtttgttgctgtcttcctcttggctctcattgccatttccatgctccaaaccttggttgtggcatcccatgggcgtggaggtcaccacaataacaacaagaacaaatatggacctgggagtctcaagagcttccaatgtccatcacaatgcacgaggaggtgtagcaagacccagtaccataagccatgcatgttcttctgtcagaagtgctgcaagaagtgcctctgcgttcccccagggtattatgggaataaagctgtgtgcccttgctacaacaactggaagaccaaggaaggagggcctaagtgcccttgaacaataattaatttcccttccctggtctccttttactatattatatgtatcaagtgttatgctctcggaatagcagtaac

SEQ ID NO: 387 - DNA, 398 bp, Populus trichocarpa
ctagtctccagtggtgattatactttagcaatggctatttcgaagcttttgatcgcttcacttgtcgtatctcttcttgtgctccagcaggtgaacgcaagtccggctgcaggttctattcctgggaaaaacattgattgtggcggggcttgcaaagataggtgttccttgtcctctaggccacatctttgcaatagggcttgcgggacatgctgtgcacgatgcaaatgtgttcctaaaggcacttccggcaacctagatacttgcccttgctatgccaccatgactactcatggtggcagacgcaagtgtccttgaaatcagcctttacctacttgtaaaaagcacagtgattctctacatatatcaaataatccttggagttcgagtaatatagc

SEQ ID NO: 388 - DNA, 374 bp, Populus trichocarpa
ctttctttgttaggcctctaaaattagcaaatgcaggctccatccctgtttgtgtttatttatttagttctcgaaatactcatcatgttggtgatttcttgtggtgtagctttctgtaccaagaagtgcaatacgaggtgcgcaaacgctggcatacaagacaggtgcttgaagtactgtggaatatgctgtgaacagtgcaagtgtgtgccttctggaacttatgggaacaagcacgagtgcccttgttacagggacaaaaggaactccaagggcaagcccaagtgtccttaaatgataatctcttacacagtcaggatgtgcctgtgttgagaaagtaagatctcatgtatatgtacgagctagctgtgtat

SEQ ID NO: 389 - DNA, 452 bp, Populus trichocarpa
ttatactgttcatttctccccaccaagaaaatgggcaaatcaagcattgccatttttttatgctctctgctggtgcttgttctgctaggacaaaaccaggctcttaaaacaccaatctcagcttcacagacacaacgacagggcaaccatgcaatgtatggggccactcaaggcagtcttcgtcctcaggaatgtgcaccaaggtgcaccaccaggtgctcagccacagcatacaagaagccatgcttgttcttctgccaaaagtgctgtgcaaagtgcttgtgtgtgcctcccggcacgtatgggaacaaacagtcttgcccttgctacaacaactggaagaccaagagaggagggcccaaatgcccttgaaaattcatgtttctactcgaccgtccccttccagcagctacttaatttattagtaatcgctatatatatatgtaaccagt

SEQ ID NO: 390 - DNA, 848 bp, Populus trichocarpa
tttgttgctgcttcacctctggtcctgacaatggctttcaaagctgtttgtcttatggtggttgcttttgttttagttactgcaaaggcttcatacatgaatgaagacttcaaggagaaggctgttttttccaaatctgtggtgcctgcatcaactcctgctcctccagaggtcaagtcaccgacccccgccccaccagtggtcactccttccacaccattgtacaaaccaccaactcccgcgccaccagttaagacaccacctccagcaccgccagtcaacccccccacacctgtgaagccacccactactcccgccccaccggtctacaagccaccatctccagcaccgccagtcaacccccccacacctgtgaagccacccactactcccgccccaccggtctacaagccaccatctccagcaccgccagtcaacccccccacacctgtgcctcctgtgaagccacccactgctcctgccccaccggtctacaagccaccatctccagcacccacacctgtgcctcccgtgaagccacccactactggaccaatgcccccgccagttaggacaagatcggattgcacccctctatgtgggcagaggtgtaagttacattcaaggaaaagactgtgtgttagagcttgcatgacttgctgtgacagatgcaaatgcgtgccgccggggacttacggcaacagggagaaatgtggcaagtgctatactgacatgaccacccgccgcaacaagcccaagtgcccttgaattttttaaaaatctcgactgtgatatatgttattgctattatgttatactatatagtttaagaataaacttttctcata

SEQ ID NO: 391 - DNA, 311 bp, Populus trichocarpa
ttttcctttccagctttgatacatactgcgatggattcaatccgctattgtggagggttatgcaagcagagatgcagtcttcactcaaggcctaatctgtgcaacagggcatgtggcacctgctgtgtgagatgcaagtgcgtgcctcctgggacctcagggaacagagaagtgtgtgggacatgctatactgacatgaccacccatgggaacaagaccaagtgcccataggaccaagaaccgtgggctttgggtagctttctgtcttgggttctcttttcagcttttgtctaatcaaatgataataatgt

SEQ ID NO: 392 - DNA, 377 bp, Populus trichocarpa
ccacacatactttcagatcatataacagaaatgaagcctgtttttgcagctatttttcttctgtgccttgttttcagttcctctttgtttgaggtcacaatggctgcctcgggattctgtgactcgaagtgctcagtgaggtgctccaaagcaggaattaaagaccggtgcttgaagtactgtgggatttgctgtgaaaagtgcaagtgcgtgccatctgggacttatgggaacaagcacgagtgcccttgctacagggacatgaagaactccaagggcaaacccaagtgcccttgatgttgtataatgatgccgagtgttacagatgtatgtctgcatgttgagctgggtcgtaaaactactagtaattaggtcgt

SEQ ID NO: 393 - DNA, 386 bp, Populus trichocarpa
aagcgttttcctgtcctaagaaagtttgaaatggtcagtgccaagacaacatttatcttggcaatactttgcctggccctaatgcatgagcttcagatccgtactgttgaagctgggaaaataaattgcaagtccaagtgtgaatacaggtgcagcaaggcatcgaggcacaaaatgtgcataagggcttgcaacacatgctgtcagaggtgcaattgcgttccacctggaacttctggtaacgaagatacctgcccttgctatgccaacatgaccacccatgggggtagacacaagtgcccctgaatcaatccatattcttgcagacctggcttatgaatatctatgataagcacaggttacgaatttattatgaatagtagaag

SEQ ID NO: 394 - DNA, 392 bp, Populus trichocarpa
taacttcaagaaagtggcagctagctagccatggcagtgcgttcgcttcttgctttgatggtttttgttttctgccttgcagagcttgttgtgagaggtggaaacaggaggctcatgcaagacatagactgtggagggttatgcaagcagaggtgcagtcttcactcaaggcctaatgtgtgcaccagggcatgtggcacctgctgtgtaaggtgcaagtgtgtgccgcctgggacctcagggaacagagaagtatgtggaacatgctatactgacatgaccacccatgggaacaagaccaagtgtccataggcctgtgaaccagggagattgtgtagccttttatattcgcagctggaaactgggatctctttcagcttttgtctaatcaa

SEQ ID NO: 395 - DNA, 398 bp, Populus trichocarpa
aagagagagagagagagataacagagcaccatggctagcctcagtcgcaattccctcttggttgtcctttctctctgtcttctaattacattttctaacgtggctgagatccatggtgccaagctccgtccttcagaatgcaaaccaagatgtaattaccgctgctcagcaacatcacacaagaagccatgcatgttcttctgtctgaaatgctgtgcgacatgcctctgtgttcctcctgggacttatggcaacaaggaaacatgcccttgctataataactggaagaccaaggaaggaagacccaagtgcccttgacctcgaggcttagctagttagctaccttcgatcaaaaactaaagacaataaaaatagacgcctagaatcccattctcatt

SEQ ID NO: 396 - DNA, 317 bp, Populus trichocarpa
ggagaatacttcgtgcctaatcatgcatgcatgttaatttggtttcgtttttcagattgtggaagcgcttgcaaggcaaggtgccagttatcatcgaggccacgcctgtgcaagagagcatgtgggacttgttgttcaagatgcagctgtgttcctccaggaacagccggtaactatgaggcttgcccctgctacgccagcttgactacccatggcggcagacgcaagtgtccttgaagcacatctaatttccgagcatctcatgattttaatcatacttatgttagatttttgtaaataaaaagagtggaaagaaa

SEQ ID NO: 397 - DNA, 350 bp, Populus trichocarpa
cccagtatgcaaatcactttttggatgcagatggatgaagaaagcgatgtggtagctattgataagaaacattatcctaaaagaatcaattgtggttatttatgcgcaaggagatgcagggcatcgtcaagaaagaatgtatgccacagagcatgcaaaacctgctgcaacagatgccggtgtgttccaccaggtacctatggcaacaagagtgcatgcccatgttatgcaagccttaggacccatggaaacaagcccaagtgcccttaaatttcatgcaactatgtagtttctggagtgcaggacatccaaatgtcttttgaatgttgattctactatttcctagctgg

SEQ ID NO: 398 - DNA, 492 bp, Solanum_lycopersicum
tgaagttatttctattaactctgcttttggtcactcttgttattaccccttctttcattcaaactactatggctggttcatatttttgtgattcgaagtgcaagctgagatgttcaaaggcaggacttgcggacagatgcttgaaatactgtggaatttgttgtgaagaatgcaaatgcgtgccttctggaacttatggtaacaaacatgaatgtccttgttatagggacaagaagaactctaagggcaagtctaaatgcccttgaatttgatgtattttaaatatctaagtggttaaatttggtctttacatattaagttttctaggtatgttaaagttatacatataatttgaaaactagaagaaaaaaaaaagtttgttatattaataaataaatgggttcttctttgaactcttagggtaattttctgatttgttataaatgtaatatgattttgaattcacataaataataatttactgtttggttt

SEQ ID NO: 399 - DNA, 725 bp, Solanum_lycopersicum
acctagacttaagctaagttttaagcaggagctgcggttataatatacatggcgatggcgcttcgtgtactgcttcttttagttttatttttccttactgttaaggcacaggattctattattgatctcaaggaagttgaagaagacaaacaacaacatgttggtctcagccaggcacttcgtgttttcaccagaggagccaatagaaggctagttcaagacatagttttaaaggttgcaaaatacttgaacaatggggatattgctctagctccagcaccagctccacctcccagtccattggattgtggaggattgtgcaaatacagatgcagtttacactcgaggcccaatgtgtgttttagggcatgtggaacatgttgtgttaggtgcaaatgtgtgccaccagggacctttgggaacagagagaagtgtggcaaatgttacactgaaatgactacccatggcaacaagaccaagtgcccttaatttattactagtaattattttacgagtgtgtatgtggaccttagcatatttaattttatcatatctttatgagatagtaatagcaaatcatgtctggctacattgcagtatatatcttgctgctaagccatgtgcaagttgcggtggtttgaaaaatattgtatgattatgttttacccatgtttatgttgatatatgtcatcacttggttgctatttgttcaaagtggcggagtt

SEQ ID NO: 400 - DNA, 819 bp, Solanum_lycopersicum
atcggccgaattgataaatcaattttttggagaaaaaatctcaaaaatatttcaaattccaatggccatttctaaagctctctttgcttcattacttctctccttgctccttctcgagcaagtccaatctattcagactgatcaagtgagcagcaatgctatttctgaaggcgctgattcctacaagaaaattgactgtgggggagcttgtgcagcaaggtgccgattatcatcaaggccaagattgtgtcatagggcatgtggaacttgttgtgctagatgcaactgtgttcctcctggtacttctggcaacactgagacttgcccttgctatgccagtttgactactcatggcaacaaacgtaaatgcccttaaatttcttctaaaaatatcgtatatcgtgtgattaccacggatatgttattattgtagtgtattattttgtcatatattgtgtcaataatcaaaatccagtaaaatatctttagcgtgggtaatttattttttggggtgttgtctttgtaattttgaggaaattttatttgtgtgttgattagtacatctggtgtaatatttattctggtttgcattgtattgtataataagatgaggaataaatgaagtttgagtatattaaaaaaaaacaccaattaacatgaagaagtacgagactctgtcgtaccttcctgatttgtccgacgagcaattgctcagcgaaattgagtacctattgaaaaatggatgggttccttgcttggaattcgagactgagcacggatttgtgtaccgtgagaaccataagtcaccaggatactacg

SEQ ID NO: 401 - DNA, 508 bp, Solanum_lycopersicum
tggttacaatgctagcttcttgttacttatctcaatgttcttgattttgctcactttctctaacgtggtcgagggttacaacaagctccgcccaacagattgcaagccaagatgtacttatagatgctcagcaacatcacacaagaagccatgtatgttcttttgtcaaaaatgttgtgcaacatgtttatgtgttcctaaaggagtttatggcaacaaacaatcatgcccttgttacaacaattggaagactcaagaaggaaaacctaaatgcccttaattaattaaaatattaataattagggaaattaatctttttttcccaataattaatggaaaagattaagagtactatagctatatgggcatattgtgttttgtattgcattaaattgatttggaagaattttgatgtaatggtttaagcattttggatttctctacttggggtatcatggtggctgagctgaattgtagtactggagcgatatatgatctatgtattagg

SEQ ID NO: 402 - DNA, 612 bp, Solanum_lycopersicum
gctcttagcttcacacaaaattactacaatggctgggaaaatgagcattgtcttgtttgttcttttggtggttttcctgactcaaaatcaggtttcaagggccaacattatgcgtgatgagcagcagcaacaacagagaaataaccaactgtatggtgttagtgagggaagactccatcctcaagattgtcaaccaaaatgcacgtaccggtgttcaaagacatcgtataagaagccgtgtatgtttttctgccagaaatgctgtgcaaagtgtttgtgtgttcctgctggtacctatggcaataagcaaagttgcccttgctacaataactggaagaccaaaagaggtggcccaaagtgcccatgatcatccatattgtattaaaatgtgactgcagacacccaacttctgtcaaatctagtagttaatcaacacttgttgtctcaagtggtgtattagctagtaatgttaggtcccaattatatagaagaagattgggctagctacaagtacaatagcatggttatgattatgcagctttttttgtgagacttattttatattattattatgattatatcttaagtgatatttatgtggtgtaccataag

SEQ ID NO: 403 - DNA, 512 bp, Solanum_lycopersicum
aatgtgtgttagccatggccatctccaaatttcttcttgttactatggttttgatttctctacttgtttttcgtcctgtggaagctaatggcaacggtgacggtgacaatttagcggtgcacacggctggaccagagggtgctaacaaccctacttacatccctacatcagagtgtggaacagcatgtgaggcaagatgtagtctagcatcaagacataaaatgtgtttgagagcatgtgggacttgttgcactcgttgtaattgtgtgcctccaggcacctctgggaaccaagatctttgcccttgttaccgtgacatgctcactcatcatggcaagcacaagtgtccctaaatatatatatatatatatatatacttatacatagtaatatatgtataacataaaactttttaagaagtgatcaaaaataaaacgcgataaattttagatgatttttagatattttatttaattttttatcggcttgaaaatttgcgatttcttttgtat

SEQ ID NO: 404 - DNA, 706 bp, Solanum_lycopersicum
atttatcttctcttcttcttaaatattttattttccttcaaactatatagtaatttcactttccatttgaagagaagaaaaatggcaaagagtggttacaatgctagcttcttgttacttatctcaatgttcttgattttgctcactttctctaacgtggtcgagggttacaacaagctccgcccaacagattgcaagccaagatgtacttatagatgctcagcaacatcacacaagaagccatgtatgttcttttgtcaaaaatgttgtgcaacatgtttatgtgttcctaaaggagtttatggcaacaaacaatcatgcccttgttacaacaattggaagactcaagaaggaaaacctaaatgcccttaattaattaaaatattaataattagggaaattaatctttttttcccaataattaatggaaaagattaagagtactatagctatatggtcatattgtgttttgtattgcattaaattgatttggagtaattttgatgtaatgttttaagcattttgtatttctctacttgtgttatcatgttgtctgagctgagttgtagtactggagcgatatatgatctatgtattaggattcatatagccgttttcaacttgctcggagatgaagtgttattgtaatctttcttttttataacgagactataataataacttatttattgaatcgagtttgttc

SEQ ID NO: 405 - DNA, 551 bp, Solanum_lycopersicum
tgtagaaggctttctcagttcttaagagctctctgttttctccttccttcgtgtatacacacaccattttgtgtttttgtttttgaaacaatgacggtccaaaaggcattcgttgcaatgcttattgcatcctttctactagtccatttcgctaatgctcaaaaggttgactacagcaagccaccagcatcagcccctcaaggtccacagccactagattgcataggagcttgtaaatatcggtgcagtgagtcgtccaggcaaaatctatgcaacagagcatgtggaagctgctgccatagatgccactgtgtgccaccagggacttctggaaattatgaatcatgcccttgctatttcaatcttacgactcataacaccacccgcaaatgcccttaatccctttttcttagtttttaaatttgttccccaaaggaagtccattttcaaaaaaaaaaacagagtgtaactttcaattcaattcaatgttccttctgtttacgaagcttgtgatgatgcaataatacataagtatttataactttgttcat

SEQ ID NO: 406 - DNA, 553 bp, Solanum_lycopersicum
gatttacttctatactctcattttcaccaagaaaatcaagcatggccaagattgtttcagttctccttttggcccttcttgtcatttccatgcttgctaacactgttatggctgcaaatggcaaacaccaccactatgctaagaagtatggaccaggaagcttgaagccctcgcaatgtctaccacaatgtacgaggaggtgtagcaagacacagtaccacaagccatgcatgttcttctgccaaaaatgttgcaacaagtgtttgtgtgttccacctggtacctatggaaacaaggctgtttgtccttgttacaataactggaagaccaaggaaggaggacctaaatgcccttaatttactttctgttttcatctaatatgtctacctaatcttcttgttttttctcctattgcacttttatctaacccaagtggttatatatgtaatatgaccatatttccagagtttaaatggaacaaaaatatcactcccactcttgctagaaagtttaatcttcctttggaccaaacaaatttccatctttcctcatt

SEQ ID NO: 407 - DNA, 549 bp, Solanum_lycopersicum
accaactgtatggtgttagtgaggggaagacctccatcctcaagattgtcaaccaaaatgcaccgtacccggtgttcaaagacatcgtataagaagccgtgtatgtttttctgccagaaatgctgtgcaaagtgtttgtgtgttcctgctggtacctatggcaataagcaaagttgcccttgctacaataactggaagaccaaaagaggtggcccaaagtgcccatgatcatccatattgtattaaaatgtgactgcagacacccaacttctgtcaaatctagtagtattaattaattaatcaacaccttgttgtctcaagtggtgtattagctagtaatgttaggtcccaattatatagaagaagattgggctagctacaagtacaatagcatggttatgattatgcagctttttttgtgagacttattttatattattattatgattatatcttaagtgatatttattgggtgtaccataagaattatagaatgttcaagtcatctaatccaaggccaactctggcgtttgaatgggctattatact

SEQ ID NO: 408 - DNA, 583 bp, Solanum_lycopersicum
ctcgtgcctttctctcttttgttcaattaatatatcaagaaaacaacaaaatggagaagacacttagcttagtgctaatactccctcttctaataatgcttcttcttgttggaactcatgcaaaaataataatagaatctccagcacctcagccacaacctcctaacactttaccaatgaatggtactactcctggtagtctccatcctcaagattgtttaccaaagtgcacatatagatgctcaaatacacaatataggaagccatgtatgttcttttgccaaaaatgttgtgcaaagtgtctctgtgttcctgctgggacttatgggaacaaacaattttgcccttgttacaataattggaagactaagagaggaggcccaaaatgcccttaatcatatatgcactgacgataaaaagaagttttatattacgagtttactaaattaattatttgttataaaataatgtttgtagtatttttaagttacgagtttcgcttattataaatcatctcatgtaattatgttttaagggattgaatagaataaattattttattttatcattatataaaatatta

SEQ ID NO: 409 - DNA, 815 bp, Solanum_lycopersicum
gagagagagagagagagagagagagagagagagagaggcaggagattcaaggagaagaaagaaaaaatagaaccagaagctgatccagaaagggaccagagaactgtttttgcttaccagatgcccttgaaggcgactgaaagggatgtgtatgagtttttctcacaagcaggaaaggtgagggatgtgcggttaataatgtacccaactcctttagatcgccttgaatttcggtccatgccagctcagatttcagagttctcagctttactttttttttggtatcttaaacaatggcatccctaaagggatttgcagctttgctcattgcatcacttgtgcttgttcatttcacttatgcccttcaagaggtaattagcggcaaaccaccagcaccaagtcctcaacctccaaagccaatagactgtacgggatcttgtaaaacgaggtgcagcaaatcgtcacggcaaaatctctgcaacagagcatgtggaagttgctgccgtacctgccactgcgtgccaccagggacttctggaaattacgaagcatgcccttgctatttcaaccttactactcataacagcacccgcaaatgtccttaaaaattcatagcataattttgttcttcgtctgcaaatttaaatgtactagtatttcttattgaatactactattatattgtgtactatgaaacgtgaactgttgattttgaaattttaagtgtaaaattgaaggttgagagttttcagtgcaatattaaaatgggtgggtactattaaattcattgactctggtcgtcccatttactgtac

SEQ ID NO: 410 - DNA, 702 bp, Solanum_lycopersicum
gctgcacccgttgaagttggcacaatgttgagagctgcagctcttgcacgtctaaggtccttgtggcttgcatcaagcagcctttggtcaccagtgtaggagtgtgttgttgtttacttttttttaaaaaaaaacatgaagattttcacattatttctcattttcatcctcctcatacaggttttcgccaatgctgctactgaacagatagaggcaggcaatgaaggagctcttcacaaaaaaattcacccaattaagaggatacactgtggatacgcatgtgcgaggagatgcaagaagtcgtcaagaaagaaggtgtgcatgagggcatgcaagacatgttgtgcaagatgcaagtgtgttccaccaggcacttatggaaacaaggaagtttgcccttgctatgctaggcttaggactcatggcaacaagcctaagtgcccttaattaatttataattttttaaattaagaaaaagaaacaatgcatattatttatgaaataaatgctatagattttaattaatttctccatttttctgttttaatactgttgggaaggagggggtggggtttgagggaataaaatgagagaaattgttgcatgagtgtatgcaagtgtgcttttgaatatttgattatgactcctttgtttgtgagataaaattaatacatataaatgtattttatgtattttcttgat

SEQ ID NO: 411 - DNA, 442 bp, Solanum_lycopersicum
tcaacactccattggaaggttcaattggtgtaacacctagagatgaggcttcttcacatttttttggctttgctcattatggcttcaatgtcaagagctcaacctcctgttggtccaacaacttgtcctgtgcctaaagataaatgtgaagaggcatgcaatgtgagatgttcacaaaaaggtcacaaaaaaagatgtttgttttattgcaaccattgttgcggatggtgtcaatgtgttccaccaggttatgttggtgaaaataaagattgttgtccttgctatagagattggaagaaacagacaggagaaccaaaatgtccatgaaattaaaaattaattaaattaatttatcatggattaacaatatggtttttattgtattaatactttatttgatcttcttgagagtgttgttaatatatctttaacttttttatgc

SEQ ID NO: 412 - DNA, 700 bp, Solanum_lycopersicum
  misc_feature (357)..(357): n is a, c, g, or t
  misc_feature (562)..(562): n is a, c, g, or t
tttttttattgattcaaacaataggggaaaagatcgtacagttccctaccgagacaaactctcaacggatcctccgcgcgctgggaatacctcttccgtgcgtctttctcgtggcgggaacagaacaacagggaaagacccggcccagggcgagctttatttatttaagagagaatggggagtgaatcgaattccgtttccgttctttgggggctttcgggcccctctcgatctttttcgtagttgagaagggggaaggagtctaaatcaatggacattaatggttcacacaaaggtcacaaaaaaagatgtttgttttattgcaaccattgttgtggatggtgccaatgtgttccnccaggttatgttgggcaaaataaaggatgttgttcttgctacaacaattggaagacacaaataggaggaccaaagtgtccatgatatttatatattaatcgtggaaaaatagtttgtcggagaatcttagtagttcagttagttgtattggttgactggtttacttggattttcactttgttggtgattgttcgattctccgccntgtaattttctgtcttcattgtatacgttttatgtgtatttttcttttatttgttcttctcgaggaagtgtattttttcctatcgtagcgtaggaagagatatctttctctttattagagccaagatcgtacgaggag

SEQ ID NO: 413 - DNA, 569 bp, Triticum_aestivum
  misc_feature (193)..(193): n is a, c, g, or t
  misc_feature (240)..(240): n is a, c, g, or t
  misc_feature (286)..(286): n is a, c, g, or t
  misc_feature (329)..(329): n is a, c, g, or t
  misc_feature (360)..(360): n is a, c, g, or t
  misc_feature (388)..(388): n is a, c, g, or t
  misc_feature (435)..(435): n is a, c, g, or t
  misc_feature (441)..(442): n is a, c, g, or t
  misc_feature (452)..(452): n is a, c, g, or t
  misc_feature (492)..(492): n is a, c, g, or t
  misc_feature (498)..(498): n is a, c, g, or t
  misc_feature (505)..(505): n is a, c, g, or t
  misc_feature (529)..(529): n is a, c, g, or t
  misc_feature (548)..(548): n is a, c, g, or t
  misc_feature (552)..(552): n is a, c, g, or t
  misc_feature (558)..(558): n is a, c, g, or t
gttcacatcgctcttacccagccacacgcggagaagagacccagcaagcgccatggccaagatctccttcctcctcgtggcgctcctcgtcctcgccgtcgcgttccccgtggaggtgatgggaggcggcaacggcggcgccggcggcggcggcaagctcaagccatgggagtgctcgtccaagtgctcgtcncggtgctcggggacgcagtacaagaaggcgtgcctgacctactgcancaagtgctgcgccacttgcctctgcgtgccgccgggcaactacggnaacaagggcgcctggccctgctacaacaactgggaagaacaanggagggaaggcccaaagtgccctagaatccntgaatttccttcctcctcctccgggggngcaacttgcggttgatggtattcactggctccggcatcaaaatgttntacagnnatttttaatntgtggtgggggatttatcaattgggaattgggattggccncccaanttctgtnttttttcaaaaaaattgggaaatngggggacccgcaatcccanatgntttttnggggccttcca

SEQ ID NO: 414 - DNA, 832 bp, Triticum_aestivum
  misc_feature (752)..(752): n is a, c, g, or t
  misc_feature (756)..(756): n is a, c, g, or t
  misc_feature (781)..(781): n is a, c, g, or t
  misc_feature (793)..(793): n is a, c, g, or t
  misc_feature (807)..(807): n is a, c, g, or t
  misc_feature (809)..(809): n is a, c, g, or t
  misc_feature (831)..(831): n is a, c, g, or t
gcatcaaagaacagacagcacaacaaaggtacaaagtctagaaacccaaatgcgagaagacgttacatggaagcactcctcctcaaaccagatctacgttgtttattctgaacaaatcaaacttacaaacaaggggagcccctaaatcccacgcactcggctcgtcaagatccatctcctacgttcccattcaccttaaaaaaaaagatgaatggtggtagtcctaggggcatttggggcggccgctcttgggtgatttcatgtcccggtagcaggggcactcgtccttgggggccaacggccccgacggcacgcagccggcgcacttgccgcagcacatcatgcacagccccatgcaccgcccggccaccttctgcgagcaccggttcttgcacttgccctcgcacacgctgtccaggaccggagcgccgctgccgactccatctgcatctgcatctgcagcagccacggcgagatcctggtacgaggcggcgaggaagagggccaggagagccagggtcaccgggagaggcttcatcgccgtacgtctcttcttcaactttgtccaagagatgtttggcaaaagcagccgcttatttggctgaggagaggtgaaaatgcaacgaagctctctagtttgattcctggatcccgtgccctgcatggagatatcgcacaagctcaacgtgaagtcgtcattgctggatttaggagcgggaagttccttgttttggttgctacaaatgtggcancaanaggccttgacattaatgatgtgcancttatcattcantgtgaacctccacncnatgttgaagcctacatacatcng

SEQ ID NO: 415 - DNA, 1013 bp, Triticum_aestivum
  misc_feature (8)..(8): n is a, c, g, or t
agaattantacggttatccgagtagcacgtacccatcaaacaaactataactgatttaatgagccattcgcagtttcacagttcaaattggttcatacttgcacatgcatggcttaatctttgagacaagcatatgactactggcaggtttcttccacatttcccctgagcaaagagaagcaaatcacaagaaagcgaagcaaatcggcgggatggccggccaagctagggcgttcatgtgcgtggcgctcgtcgtcctcctgctcctcgtcgagaccaccgccccgagtggacaagctcacgccgtcgattgcggcagcgcgtgctcgtaccggtgcagcaagtcgagccggccgaatttgtgcaacagggcgtgcaacacgtgctgccggcgatgcgactgcgtgccgcccggcaccgccggcaacgaggacgtctgcccctgctacgcccacatgaccacgcacgacggccgccacaagtgcccatgattcaaccgccttctcgacggccggtcgaggctaatgcatactagatcatggcgtctcagtaaatatcccatcaagctagctacagccaacgataactagactaccaggggcacgatcgatatgatatcatgtactcaagctagtgctgctgcctatgtaccttgtgctcatccatccgtgatcgatccatcgtgtaagcatgtttgctatctcgttctcacgcagtggtaattgccgtcaattgcactaaaacaattagtgcgtatggtattgaatttatactccagccaactcatgtaaaagtctgaactgatgaagagaggcggacaatatatatctacaccattctccctcacgtctaggcttatttactccttagacgtaggatttgtctaggccgcataatcgtttttttaatactgcgttggtagggtctgatcacaagacctctcggctctgataccatattgaattcctgcttcagtcagtttattcaaaagtccgaactgatgaagaaagacg

SEQ ID NO: 416 - DNA, 415 bp, Triticum_aestivum
tacatgtgcaactaagaagcatggcttgtgtcgcacgcactctttccattcctttcttgcttgcattattcttcgtggctgaggtatccgggagcatgaacgtagaatcatacaaaccggctggtgcagaaggatctgttcctttaaaagaatgcccagcgaaatgcaagatccgttgctcagctacgtcacacaagaaaccatgcaatttctattgtaactactgctgcaagaggtgcctgtgtgttccgtccggcacggtgggcaacaaggaagaatgcccgtgctacaacaacttgaagacccaggatggcaagcctaagtgcccgtgatatgcctgcaagtcgtgtgtggcctccaagttttacagtcttgttgtatcgaacaaagtattgataataaagttgacttgttt

SEQ ID NO: 417 - DNA, 670 bp, Triticum_aestivum
tcggcacgaggactccagctccctactctcaaggctcaagctcacaccaaccagcaggcagcagcgctctgccagagccaagaacctcaagcacaccacaatgaagcttggccccaccgccaccactgtggctctcctccttgtcctcctcttagcgtcctcgtctctgcgtgccgccacggctggatcagcgttctgcgacggcaagtgcggggtgaggtgctccaaggcgagccggcacgacgactgcctcaagtactgcgggatatgctgcgccgagtgcaactgcgtgccgtcggggacggccggcaacaaggacgagtgcccctgctaccgcgacaagaccaccggccacggcgcgcgcaagaggcccaagtgcccatgatccaccaccaccctccagccaccctccgccgctgatggcgcctgcctagcatgtacctgaacttcatgcatccctatcaatcatgtcgtactatgtcgcggatcaccactatatattatatgcgtgtaaatcatgatcttgagcgtccggtgcatgatcctactgtgtgttgataatgcataatgctggcctagctactggtttgccggcaaaaatgtcgctgtgctgtaataatgaaccatcatgcatcagtaaagtttgtccagtaatttccttgttctaaaa

SEQ ID NO: 418 - DNA, 533 bp, Triticum_aestivum
  misc_feature (496)..(496): n is a, c, g, or t
cctgagcttctcccgacctttggtcaggcaaaggaggcggccaacaaggacgagcgatggtgaccaaggtcatctgcttcctggtgctcgcatccgtgctcctcgccgtcgcttttcccgtgtctgctctgcggcagcaggtgaagaagggcggcggcggtgaaggcggaggcggaggcagtgttagcggaagcggaggcggcaacctgaatccctgggagtgctcgcccaagtgcgggtcgcggtgctccaagacgcagtacaggaaggcctgcctcaccttatgcaacaagtgctgcgccaagtgcctctgcgtgccaccggggttctacggcaacaagggcgcctgcccctgctacaacaactgggaaaacaaggaaggagggcccaagtgcccctagaagatcaacgcagctcccgtccgccattgtcccccttctccgaatctggaacgtgttgttcatcttcgacaacccctaagcttggattttatacnagtataatgctagtgtccgccgttgcttaatctggaa

SEQ ID NO: 419 - DNA, 661 bp, Triticum_aestivum
ccacgcgtccgcgactggagcacgaggacactgacatggactgaaggagtagaaatcaaagtccacaattcacaccgctcctacccagccacgcacgcgcggagaagagaagcagcaagccccatggccaagatctccttcctcctcgtggcgctcctcgtcctcgccgtcgggttccccgtggaggtgatgggaggtgggggcggcggcggcggtggcggtggcggcggcaacctcaagccatgggagtgctcgtccaagtgctcgtcgcggtgctcggggacgcagtacaagaaggcgtgcctgacctactgcaacaagtgctgcgccacctgcctctgcgtgccgccgggcacctacggcaacaagggcgcctgcccctgctacaacaactggaagaccaaggagggaggccccaagtgcccctagattcttggttttcttcttcttcttcttcttcttctggggtgccagcttgcggttgatggctattcactgctctcccatgaagatgttactagatctgaattacgtatgtgataggcatttagtggcatgtgaattgccctcccagtttcctgtgtttctatcagtaagatgtggaaaaatggaggcgctcccacatgattttagtgggacactatcgagctgtattgttcct

SEQ ID NO: 420 - DNA, 490 bp, Triticum_aestivum
gggctgcaggtaattcggcacgagggctccctactctcaaggctcaagctcacaccaaccagcaggcagcagcgctctgccagagccaagaacctcaagcacaccacaatgaagcttggccccaccgccaccactgtggctctcctccttgtcctcctcttagcgtcctcgtctctgcgtgccgccacgggtggatcagcgttctgcgacggcaagtgcggggtgaggtgctccaaggcgagccggcacgacgactgcctcaagtactgcgggatatgctgcgccgagtgcaactgcgtgccgtcggggacggccggcaacaaggacgagtgcccctgctaccgcgacaagaccaccggccacggcgcgcgcaagaggcccaagtgcccatgatccaccaccaccctccagccaccctccgccgctgatggcgcctgcctagcatgtacctgaactttatgcatccctatcaatcatgtcgtactatgtc

SEQ ID NO: 421 - DNA, 419 bp, Triticum_aestivum
  misc_feature (318)..(318): n is a, c, g, or t
  misc_feature (332)..(332): n is a, c, g, or t
  misc_feature (371)..(371): n is a, c, g, or t
  misc_feature (384)..(384): n is a, c, g, or t
cctccagcctcctcctatcgtcaagctcacaccaaccagcaggagggctctgccagagcgaagcaaccaagaacaccacgatgaagaagcttcgcaccaccactctggctctccttctcctcctcgtcttcctagcagcctcgtccctccgtgccgccatggctgggtcagcgttctgcgacggcaagtgcggggtgaggtgctccaaggcgagccggcacgacgactgcctcaagtactgcgggatatgctgcgccgagtgcaactgcgtgccgtcggggaccgccggcaacaaggacgagtgcccctgctaccgcnacaagaacaacggncaaggggcgcgcaaagagggccaagtgcccaagattcgncaacaatctccangcatcgattctccaacgcccatggggtctaaacaa

SEQ ID NO: 422 - DNA, 463 bp, Triticum_aestivum
  misc_feature (337)..(337): n is a, c, g, or t
  misc_feature (426)..(426): n is a, c, g, or t
  misc_feature (463)..(463): n is a, c, g, or t
ctccagcctcctcctatcgtcaagctcacaccaaccagcaggagggctctgccagagccaagcaaccaagaacaccacgatgaagaagcttcgcaccaccactctggctctccttctcctcctcgtcttcctagcagcctcgtccctccgtgccgccatggctgggtcagcgttctgcgacggcaagtgcggggtgaggtgctccaaggcggggcggcacgacgactgcctcaagtactgcgggatatgctgcgccgagtgcaactgcgtgccgtcggggaccgccggcaacaaagacgagtgcccctgctaccgcgacaagaacaacgggcacggngcgcgcaaagaaggccaaatgcccatgattcgccaacactctccaagcatcgattctccaacggccatggggtctaaaaaacatattgncttgaagcttcatgcaaccctatctaatcaagttctn

SEQ ID NO: 423 - DNA, 711 bp, Triticum_aestivum
  misc_feature (1)..(1): n is a, c, g, or t
  misc_feature (11)..(12): n is a, c, g, or t
  misc_feature (111)..(111): n is a, c, g, or t
  misc_feature (145)..(146): n is a, c, g, or t
  misc_feature (149)..(149): n is a, c, g, or t
  misc_feature (152)..(152): n is a, c, g, or t
ncgcgggatanngcgtggtcgcgcccgaggtcagccacgcacgcgtggagaagagaaacagcaagcaccatggccaagatctccttcctcttcgtggcgctcctcgtcctngccgtcgcgttccccgtgaaggtgatgggagtgnncgncgncggcaagctcaagccatgggagtgcccgtccaagtgctcgtcgcggtgctcggggacgcagtacaagaaggcgtgcctgacctactgcaacaagtgctgcgccacctgcctctgcgtgccgccgggcacctacggcaacaagggcgcctgcccctgctacaacaactggaagaccaaggagggaggccccaagtgtccctagattcttgattttctttcttcttcttctggggtgccagcttgcggttcatggttattcactactcggccatcaagatgttactagatctgaattatgtgacaggcatttagtggcatgtgaattgccctaccaattatccgtgtttctatcagtaggactaagatgtggaaaaatggaggcgctcccacatgattatagtgggacctctcgagctttattgttccttgtgcgcctgtgcaccgtgctttcttcttgtctcaaaagtcagatgaagcatgaagcgcccgtaccattcggcatgaatgatgagctaccacaatgaacaaaagcatgcaacacctcggccgcgaccacgct

SEQ ID NO: 424 - DNA, 685 bp, Triticum_aestivum
cagctccctagcctcaagctcacacggtcacaccaaccagcagggctctgccactgccagagccaagcaactcaagaacagtagaacaccacgatgaagaagcttcgcaccaccaccgccaccaccactctcgctctcattctcctcctcgtcctcatagcagccacgtccctccgtgtcgccatggctggatcagcgttctgcgacagcaagtgcggggtgaggtgctccaagacgggccggcacgacgactgcctcaagtactgcgggatatgctgcgccgagtgcaactgcgtgccgtcggggacagccggcaacaaggacgagtgcccctgctaccgcgacaagaccaccggccacggcgcgcgcacgaggcccaagtgcccatgatccgccaccgcccatggcgcctgcatagcatgtacctgaacttcatgcatctttatcatgtcgtactatgtcgcgggtcactactattatattatactatatgcgtgtaaatcatgatctgaagcgtccggtgcatgatccgactgtatgttgataatgcgtaatgctggcctactggtatgccggtaaaaatgtcgttgttctgtaataataaactacatgcattattagagtctgtcaagtaaatttccttgttctgtttctgtttcctttgggtaaagtaaaatttacatgg

SEQ ID NO: 425 - DNA, 672 bp, Triticum_aestivum
  misc_feature (659)..(659): n is a, c, g, or t
ggtttcttccacatttccactgagcaaagagaagcaaatcggcagagagcgaagcaaaccggcggttcctggcccctcgccatggccggcaaagctagggtgttcatgtgcgtggcgctcgtcgtcctcctgctccttgtcgagaccaccgctccgagtggacaagctcacgccgtcgattgcggcagcgcgtgctcgtaccggtgcagcaagtcgagccggccgaatctgtgcaacagggcgtgcaacacgtgctgccggcgatgcgactgcgtgccgcccggcaccgccggcaacgaggacgtctgcccctgctacgcccacatgaccacgcacgacggccgccacaagtgcccatgatccaaccgccttctcgacgaccgatcgaggctaatgcatgctcgatcatggcgtctcagttaatatcccatcaagctagctacaaccaacgataactagactaccagtggcacgatcgatatgatatcatgtactcaagctagtgctgctacctatctaccttgtgctcatccattcgtgattgatccatcgtgtaagcatgtttgctatctcattctcacgcagtggtaattgctgtcaattgcactaaaacaattagtactcatggtattgtattcatacttcagccaactcatatnaaagtctgaactg

SEQ ID NO: 426 - DNA, 603 bp, Triticum_aestivum
ctcgagtcgcgcgctcggcgttgcatcttcacctctgctcagctaaataagtggctgcttttgccaaacatctcttggacggaaacagagttgaagaagaaagacaaggcgatgaagcctctcccggtgaccctggctctcctggccctcttcctcgtcgcctcgtaccaggacctcaccgtggccgcagatgcagatgcagatgcagctggagctggagatgttggcgccgttccggttccggacagcgtgtgcgagggcaagtgcaagaaccggtgctcgcagaaggtggccgggcggtgcatggggctgtgcatgatgtgctgcggcaagtgcgccggctgcgtgccgtcggggccgttggcccccaaggacgagtgcccctgctaccgcgacatgaaatcccccaagagcggccgccccaaatgcccctaggactagggcgcttctttttctttcttgggtggaatgggatcttgacgagccgggtgcgtgggatttaggggttccccttgtttgtaagcttgatttgttcgggataaacaacgcagatccggtttgagtagcgaggagtgaggagtgcttccatgtcttctcgcatct

SEQ ID NO: 427 - DNA, 1442 bp, Triticum_aestivum
caccatttcagagcgcgagctcgagctagcacccatggcgccgggcaagcagcttctccctcctctgcttctgctgatgctcctccaccatcagcctgccgccggcgcttccgatccaccggtgacccacggcggcatgcgagccagcaccgccaggtcccttctccagcagcagcagcagcagcagcctcccaggctagactgccccaaggtgtgcctggggcggtgcgccaacaactggaggaacgagatgtgcaacgacaagtgcaacgtctgctgccagcgctgcaactgcgtgccgcccggcaccggccaggacacccgccacatctgcccctgctacgaccgcatgaccaacccgcacaacggcaagctcaagtgcccctagaggcctagacacaacactttgacccggagaaatcatcttcttcacatgtgtcttctgtcatgcatcttctttccactagtatgtgctgtatgtgatcttcacacagcgctctgccactgttcccactctcagggaacaatgctctgggatcttatcatagtcatagcataaataaaagatgcctgccttgttgctggccagatctagttacagtatcccataagctaagataagagttacacacagccagtgttgggttgcattgcagttgcagacatgagtgatcccttctcattctcactgaatgacgatgatttcctgcattgttggtgatcagatctatattatgcagctacagagttagatagatacagtgccgagttgagttacaggcatatatgtacacacaccacatgggtgagcaagctaattagatttaaaaaggggttgcacctatgatatcaaccccaactagtaagtaagcagtgagctaaacattttctggtctggtttcactttcaattgagcagcacctccacatgtacctctatctcaaatatatacaggggtaacacaggcggacggcgccgctcagtccggatggttctggttacaggggaagtggcccccgtcagtgttctgaaacatggtgtgtgcaaaaagcttggggtcgtctaccgttgctgtcgggacaggaagaactcatagtccgggtgcctgttcctgtgggcctggtccttcttccacacgtccgccctggccatggccgccgcggcttggttcagcgtcgacaacctttcttcaagaacctgagatggttcacttgacgaggactctgagtcttccgaaccggatctgctcgtctgaaaccaccactcccccttgtcgttgtaagattgcaaacctatgactggcaaaacagcattacaatggccagcctgatctgctgagtttcctcgatgaacccagtgtccaagagaatggtacgtcaggaaagcagcctggaatttcccgtcaggtatacggtatatgggataccacgcgacacagtacc

SEQ ID NO: 428 - DNA, 612 bp, Triticum_aestivum
ccacgcgtccgcggacgcgtgggcaagctcacaccaaccagcagggctgggctctgccagagccaagcaactcaagaacaccacgatgaagaagcttcacaccaccaccgccaccaccactctggctctccttctcctcctcgtcctcctagcagccacgtccctccgtgtcgccatggctggatcagcgttttgcgacagcaagtgcggggtgaggtgctccaaggcgagccggcacgacgactgcctcaagtactgcgggatatgctgcgccgagtgcaactgcgtgccgtcggggaccgccggcaacaaggacgagtgcccgtgctaccgcgacaagaccaccggccacggcgcgcgcacgaggcccaagtgcccatgatccatgcaccacccatggcgtctacatggggcatatacctacctgaactggaagatgccctatcatgtactgtacttagtaccatgtcgcggatcactactatattatatgcgtgtaatcatgatctgaaacgcctggttcatgatccgactgtatgttgataatgcatattgctggcctactggtatgccggtaacactgtcattgtgctgtaactatacactatcatg

SEQ ID NO: 429 - DNA, 623 bp, Triticum_aestivum
acctctcaagtccacaattcacatcgctcttacccagccacacgcggagaagagacccagcaagcgccatggccaagatctccttcctcctcgtggcgctcctcgtcctcgccgtcgcgttccccgtggaggtgatgggaggcggcaacggcggcgccggcggcggcggcaagctcaagccatgggagtgctcgtccaagtgctcgtcgcggtgctcggggacgcagtacaagaaggcgtgcctgacctactgcaacaagtgctgcgccacttgcctctgcgtgccgccgggcacctacggcaacaagggcgcctgcccctgctacaacaactggaagaccaaggagggaggccccaagtgcccctagattcttgattttctttcttcttcttctggggtgccagcttgcggttgatggttattcactgctcggccatcaaaatgtactacagtagatctgaattatgtgatgggcatttaatcagtggcatgtgaattgccctcccagttacctgtatttctatcagtaagatgtggaaaactggaggcactccgccactcccacatgattatagtgggacctatcgagctttattgttccttgtgcgcctgtgcaccgtgc

SEQ ID NO: 430 - DNA, 581 bp, Triticum_aestivum
ctcaagccagcatccatggcgccgacccagcagcggcttctcactcgtcgccgtctccttcctcctctgctgctgttgctcctcctcgccgcacatcttcagcctgctgctgcttcctcttctgcttctgatccgctggtgaccaccacgacggcccacggcagcatgagggccagcagcaggtccctgctccagcagcagccgcctcccagactagactgccccaaggtgtgcttgggccgctgcgccaacaactggaagaacgagatgtgcaacgacaagtgcaacgtctgctgccagcgctgcaactgcgtgccccccggcaccggccaggacacccgccacatctgcccctgctacgaccaaatgaccaacccgcacaacggcaagctcaagtgcccttgatctagagcacatcatcttcagatgtgtcttctgtcatgcatgttctactgttcccaccctcagggagtaatggcctgtgatcttatcaaagcataaataagaagagagagtttctatctgttggttccctgcctgccttgttgctggccagatccagttatagtattccataagct

SEQ ID NO: 431 - DNA, 570 bp, Oryza sativa
gtacaaaaaagcaggcttaaacaatggaagaagaaaagagattggagctaaggctagctcctccttgtcaccaattcacttccaacaacaacatcaatggatctaaacaaaaaagctcgaccaaagaaacatcattcctttccaataacagggttgaggtagctccagtggtgggatggccgccggtgagatcatcccggagaaacctaacggcacaactaaaggaggagatgaagaagaaggagagtgatgaagagaaggaattgtacgttaagatcaacatggaaggagttccaataggaagaaaagtcaacctttcagcttataacaactaccaacagctttcacatgccgttgaccaactcttctctaagaaagattcgtgggatctaaacagacaatacactttggtctacgaagacactgaaggagataaagttctggtcggggatgttccttgggagatgtttgtatctactgtaaagaggttgcatgttttaaagacctcccacgcctcctcactctcacctagaaaacatggcaaggaatagagagaggttacccagcttt

SEQ ID NO: 432 - protein, 175 aa, Oryza sativa
MEEEKRLELRLAPPCHQFTSNNNINGSKQKSSTKETSFLSNNRVEVAPVVGWPPVRSSRRNLTAQLKEEMKKKESDEEKELYVKINMEGVPIGRKVNLSAYNNYQQLSHAVDQLFSKKDSWDLNRQYTLVYEDTEGDKVLVGDVPWEMFVSTVKRLHVLKTSHASSLSPRKHGKE

SEQ ID NO: 433 - DNA, 528 bp, Arabidopsis thaliana
atggaagaagaaaagagattggagctaaggctagctcctccttgtcaccaattcacttccaacaacaacatcaatggatctaaacaaaaaagctcgaccaaagaaacatcattcctttccaataacagggttgaggtagctccagtggtgggatggccgccggtgagatcatcccggagaaacctaacggcacaactaaaggaggagatgaagaagaaggagagtgatgaagagaaggaattgtacgttaagatcaacatggaaggagttccaataggaagaaaagtcaacctttcagcttataacaactaccaacagctttcacatgccgttgaccaactcttctctaagaaagattcgtgggatctaaacagacaatacactttggtctacgaagacactgaaggagataaagttctggtcggggatgttccttgggagatgtttgtatctactgtaaagaggttgcatgttttaaagacctcccacgccttctcactctcacctagaaaacatggcaaggaatag

SEQ ID NO: 434 - protein, 175 aa, Arabidopsis thaliana
MEEEKRLELRLAPPCHQFTSNNNINGSKQKSSTKETSFLSNNRVEVAPVVGWPPVRSSRRNLTAQLKEEMKKKESDEEKELYVKINMEGVPIGRKVNLSAYNNYQQLSHAVDQLFSKKDSWDLNRQYTLVYEDTEGDKVLVGDVPWEMFVSTVKRLHVLKTSHAFSLSPRKHGKE

SEQ ID NO: 435 - DNA, 786 bp, Arabidopsis thaliana
atgaatggtttgcaagaagtttgttcgtcaagtgggtcggtgatgatcggactaccagctgaagaagacgaaaacgccgcacattcgtcggaggattcatcttgccccgacgagtcagtgtcagagacagagctcgacctagctttgggtcttagcattggtcgtcggaaggttcgatcgtctttgtcttcctcgtcttcttctctgaccagggaaagtgggaccaaacgctctgctgattcttctccggctgccgcctcaaacgcaaccagacaagttgctgtaggttggccgcctctacggacttacagaatcaacagtttggtcaatcaagcaaagtctttagctacggaaggcggcttgagttctggcattcaaaaggagactacaaaaagtgtagtggttgctgctaagaacgatgatgcttgctttatcaaatcgtccaggacttctatgcttgtgaaggtgacaatggacggagttataattggaaggaaggttgatctcaatgctctggattcttatgcagccttagagaaaactttggatctaatgtttttccagattccttctcctgtaacaagatccaacacacaaggatacaagacaattaaggaaacatgtacttcgaaattactggatggctcatcggaatatatcataacatatcaagataaagacggagattggatgcttgtaggagatgttccttggcagatgttcctcgggtctgtgacaagactgagaatcatgaagacatcaattggagctggagtaggtaagtag

SEQ ID NO: 436 - protein, 261 aa, Arabidopsis thaliana
MNGLQEVCSSSGSVMIGLPAEEDENAAHSSEDSSCPDESVSETELDLALGLSIGRRKVRSSLSSSSSSLTRESGTKRSADSSPAAASNATRQVAVGWPPLRTYRINSLVNQAKSLATEGGLSSGIQKETTKSVVVAAKNDDACFIKSSRTSMLVKVTMDGVIIGRKVDLNALDSYAALEKTLDLMFFQIPSPVTRSNTQGYKTIKETCTSKLLDGSSEYIITYQDKDGDWMLVGDVPWQMFLGSVTRLRIMKTSIGAGVGK

SEQ ID NO: 437 - DNA, 570 bp, Arabidopsis thaliana
atggatgagtttgttaacctcaaggaaacagagctgaggctgggattaccgggaacagataatgtatgtgaagcaaaagagagagtttcttgctgtaataacaacaataagagagtactatcaactgatactgagaaggagattgaatcatcatcaaggaaaactgaaacatcccctcctcgaaaggctcagattgttggatggccaccagttagatcttacaggaagaacaacattcagagtaagaagaatgaatctgagcatgagggtcaaggaatctatgtgaaagtaagtatggatggtgcaccatacttgaggaaaatagatctgagttgttacaaaggatactcagagttgcttaaagctttagaagtgatgttcaaattctctgtgggagagtactttgagagagatggatataaaggttcagactttgtgcctacttatgaagacaaagatggtgattggatgctcattggtgatgttccatgggagatgttcatatgtacgtgcaagagactaaggatcatgaaaggatcagaagccaaaggtttaggctgtggtgtatga

SEQ ID NO: 438 - protein, 189 aa, Arabidopsis thaliana
MDEFVNLKETELRLGLPGTDNVCEAKERVSCCNNNNKRVLSTDTEKEIESSSRKTETSPPRKAQIVGWPPVRSYRKNNIQSKKNESEHEGQGIYVKVSMDGAPYLRKIDLSCYKGYSELLKALEVMFKFSVGEYFERDGYKGSDFVPTYEDKDGDWMLIGDVPWEMFICTCKRLRIMKGSEAKGLGCGV

SEQ ID NO: 439 - DNA, 690 bp, Arabidopsis thaliana
atgatgggcagtgtcgagctgaatctgagggagactgagctgtgtcttggtcttcccggtggagatacagtggctccggtaaccggaaacaagagagggttctcagagacggttgatctgaagctaaatctgaataatgagcctgcaaacaaggaaggatctacgactcatgacgtcgtgacttttgattccaaggagaagagtgcttgtcctaaagatccagccaaacctccggccaaggcacaagttgtgggatggccaccggtgagatcataccggaagaacgtgatggtttcctgccaaaaatcaagcggtggcccggaggcggcggcgttcgtgaaggtatcaatggacggagcaccgtacttgaggaaaatcgatttgaggatgtataaaagctacgatgagctttctaatgctttgtccaacatgttcagctcttttaccatgggcaaacatggaggagaagaaggaatgatagacttcatgaatgagaggaaattgatggatttggtgaatagctgggactatgttccctcttatgaagacaaagacggtgattggatgctcgtcggcgacgttccttggccaatgttcgtcgatacatgcaagcgtttacgtctcatgaaaggatcggatgccattggtctcgctccgagggcgatggagaagtgcaagagcagagcttga

SEQ ID NO: 440 - protein, 229 aa, Arabidopsis thaliana
MMGSVELNLRETELCLGLPGGDTVAPVTGNKRGFSETVDLKLNLNNEPANKEGSTTHDVVTFDSKEKSACPKDPAKPPAKAQVVGWPPVRSYRKNVMVSCQKSSGGPEAAAFVKVSMDGAPYLRKIDLRMYKSYDELSNALSNMFSSFTMGKHGGEEGMIDFMNERKLMDLVNSWDYVPSYEDKDGDWMLVGDVPWPMFVDTCKRLRLMKGSDAIGLAPRAMEKCKSRA

SEQ ID NO: 441 - DNA, 522 bp, Arabidopsis thaliana
atgcgtggtgtgtcagaattggaggtggggaagagtaatcttccggcggagagtgagctggaattgggattagggctcagcctcggtggtggcgcgtggaaagagcgtgggaggattcttactgctaaggattttccttccgttgggtctaaacgctctgctgaatcttcctctcaccaaggagcttctcctcctcgttcaagtcaagtggtaggatggccaccaattgggttacacaggatgaacagtttggttaataaccaagctatgaaggcagcaagagcggaagaaggagacggggagaagaaagttgtgaagaatgatgagctcaaagatgtgtcaatgaaggtgaatccgaaagttcagggcttagggtttgttaaggtgaatatggatggagttggtataggcagaaaagtggatatgagagctcattcgtcttacgaaaacttggctcagacgcttgaggaaatgttctttggaatgacaggtctgtactgttttcaaatgcgtacactataa

SEQ ID NO: 442 - protein, 173 aa, Arabidopsis thaliana
MRGVSELEVGKSNLPAESELELGLGLSLGGGAWKERGRILTAKDFPSVGSKRSAESSSHQGASPPRSSQVVGWPPIGLHRMNSLVNNQAMKAARAEEGDGEKKVVKNDELKDVSMKVNPKVQGLGFVKVNMDGVGIGRKVDMRAHSSYENLAQTLEEMFFGMTGLYCFQMRTL

SEQ ID NO: 443 - DNA, 720 bp, Arabidopsis thaliana
atgcgtggtgtgtcagaattggaggtggggaagagtaatcttccggcggagagtgagctggaattgggattagggctcagcctcggtggtggcgcgtggaaagagcgtgggaggattcttactgctaaggattttccttccgttgggtctaaacgctctgctgaatcttcctctcaccaaggagcttctcctcctcgttcaagtcaagtggtaggatggccaccaattgggttacacaggatgaacagtttggttaataaccaagctatgaaggcagcaagagcggaagaaggagacggggagaagaaagttgtgaagaatgatgagctcaaagatgtgtcaatgaaggtgaatccgaaagttcagggcttagggtttgttaaggtgaatatggatggagttggtataggcagaaaagtggatatgagagctcattcgtcttacgaaaacttggctcagacgcttgaggaaatgttctttggaatgacaggtactacttgtcgagaaaaggttaaacctttaaggcttttagatggatcatcagactttgtactcacttatgaagataaggaaggggattggatgcttgttggagatgttccatggagaatgtttatcaactcggtgaaaaggcttcggatcatgggaacctcagaagctagtggactagctccaagacgtcaagagcagaaggatagacaaagaaacaaccctgtttag

SEQ ID NO: 444 - protein, 239 aa, Arabidopsis thaliana
MRGVSELEVGKSNLPAESELELGLGLSLGGGAWKERGRILTAKDFPSVGSKRSAESSSHQGASPPRSSQVVGWPPIGLHRMNSLVNNQAMKAARAEEGDGEKKVVKNDELKDVSMKVNPKVQGLGFVKVNMDGVGIGRKVDMRAHSSYENLAQTLEEMFFGMTGTTCREKVKPLRLLDGSSDFVLTYEDKEGDWMLVGDVPWRMFINSVKRLRIMGTSEASGLAPRRQEQKDRQRNNPV

SEQ ID NO: 445 - DNA, 558 bp, Arabidopsis thaliana
atgtattgcagcgatcctccccatcccttgcacttagtggcatcagacaaacaacaaaaagaccacaaactgatcctttcctggaagaaaccaacaatggactcagacccactcggtgttttcccaaattctcccaagtatcatccatattactcgcagaccacggagtttggtggcgtaatcgatttaggtctcagcctgagaaccatacaacatgagatttaccactcatctggccaaagatattgtagtaatgaaggatacagacggaagtggggttatgtaaaggtcaccatggatggtttggtggtaggtcgcaaggtctgtgttcttgatcatggaagctattcaactcttgctcatcaactcgaggacatgtttgggatgcagagtgtgtcgggattgaggttgttccagatggagtctgagttctgtttggtctacagagacgaagaaggtctgtggagaaatgctggggatgttccatggaatgagttcatagaaagcgtggagcggctgagaatcacaagaagaaacgatgctgtacttcccttttaa

SEQ ID NO: 446 - protein, 185 aa, Arabidopsis thaliana
MYCSDPPHPLHLVASDKQQKDHKLILSWKKPTMDSDPLGVFPNSPKYHPYYSQTTEFGGVIDLGLSLRTIQHEIYHSSGQRYCSNEGYRRKWGYVKVTMDGLVVGRKVCVLDHGSYSTLAHQLEDMFGMQSVSGLRLFQMESEFCLVYRDEEGLWRNAGDVPWNEFIESVERLRITRRNDAVLPF

SEQ ID NO: 447 - DNA, 492 bp, Arabidopsis thaliana
atggcgaatgagagtaataatcttggactcgaaatcaccgaactacggctaggtcttcccggagatatcgtcgtctccggtgagtccatctccgggaagaagagggcttctccggaagtagagattgatttgaaatgtgaaccggcgaaaaagagtcaagttgtgggttggccaccggtttgttcgtaccggagaaagaacagtctcgaacggaccaaaagttcgtacgtgaaagtgagtgtagatggagctgcatttttaaggaagattgatttggaaatgtacaaatgttaccaagatcttgcttccgctctgcaaattctgttcggatgctatatcaattttgatgatacgttgaaggaaagtgaatgtgtaccaatatatgaagacaaagatggagattggatgcttgctggagatgttccttgggaaatgttccttggatcgtgcaagaggttaaggattatgaagagatcatgtaacagaggatga

SEQ ID NO: 448 - protein, 163 aa, Arabidopsis thaliana
MANESNNLGLEITELRLGLPGDIVVSGESISGKKRASPEVEIDLKCEPAKKSQVVGWPPVCSYRRKNSLERTKSSYVKVSVDGAAFLRKIDLEMYKCYQDLASALQILFGCYINFDDTLKESECVPIYEDKDGDWMLAGDVPWEMFLGSCKRLRIMKRSCNRG

SEQ ID NO: 449 - DNA, 804 bp, Arabidopsis thaliana
atggagggttattcaagaaacggtgaaatctctccgaagctgcttgacttgatgattccacaagagagaagaaattggtttcacgatgagaaaaactctgttttcaaaacagaggagaagaagcttgagctaaagcttggaccacctggtgaagaagatgatgatgaatcgatgataagacacatgaagaaagaaccaaaagacaaatctatcctctctctcgctggcaaatacttctctccttcttccaccaaaaccacatcccataaaagaactgctcctggtccagtggtgggatggcctccggttcgatccttcaggaagaatttagctagtggaagttcttcaaagcttggaaatgactcaaccacctccaatggtgttaccctcaagaaccaaaagtgtgatgctgctgctaagacaacagaaccaaagagacaaggaggcatgtttgtgaagatcaacatgtatggtgttcccattggtcgtaaagttgatctcagtgctcataatagctatgagcagttatctttcacagttgacaagctcttcagaggtcttcttgcagctcaaagagactttccatcatccatagaagatgaaaaaccaatcactggattattagatgggaatggagaatatactcttacatatgaagacaatgaaggagacaagatgcttgtaggagatgttccatggcaaatgtttgtgtcttcggtgaagaggctgcgtgtgattaaaacttctgagatttcttcagcattaacatatggaaatggtaagcaagagaaaatgagaagatga

SEQ ID NO: 450 - protein, 267 aa, Arabidopsis thaliana
MEGYSRNGEISPKLLDLMIPQERRNWFHDEKNSVFKTEEKKLELKLGPPGEEDDDESMIRHMKKEPKDKSILSLAGKYFSPSSTKTTSHKRTAPGPVVGWPPVRSFRKNLASGSSSKLGNDSTTSNGVTLKNQKCDAAAKTTEPKRQGGMFVKINMYGVPIGRKVDLSAHNSYEQLSFTVDKLFRGLLAAQRDFPSSIEDEKPITGLLDGNGEYTLTYEDNEGDKMLVGDVPWQMFVSSVKRLRVIKTSEISSALTYGNGKQEKMRR

SEQ ID NO: 451 - DNA, 570 bp, Arabidopsis thaliana
atggcaaaggaaggtctagcactcgagatcacagagcttcgattgggtcttccaggagataattatagcgaaatatcagtatgcggatcgagtaagaagaagaagagggtgctctcggatatgatgacctcatcagcgttagatactgagaatgaaaacagcgtcgtttcatcagttgaagatgaatcactgccggttgtgaagagtcaagcggtgggatggccacctgtgtgttcttacaggagaaagaagaacaatgaggaagcatcgaaagctataggctacgtgaaagtgagcatggatggtgtgccatacatgaggaagattgaccttggttcgagcaacagttatattaatctagtcacggttcttgagaatctcttcggctgtcttggcataggagtggcgaaggagggtaagaagtgtgaatacattattatatacgaagacaaggatagagactggatgctcgtcggagatgtaccttggcagatgtttaaagaatcatgcaagaggctgaggatcgtgaagagatcagatgcaactggttttggtctccagcaagattaa

SEQ ID NO: 452 - protein, 189 aa, Arabidopsis thaliana
MAKEGLALEITELRLGLPGDNYSEISVCGSSKKKKRVLSDMMTSSALDTENENSVVSSVEDESLPVVKSQAVGWPPVCSYRRKKNNEEASKAIGYVKVSMDGVPYMRKIDLGSSNSYINLVTVLENLFGCLGIGVAKEGKKCEYIIIYEDKDRDWMLVGDVPWQMFKESCKRLRIVKRSDATGFGLQQD

SEQ ID NO: 453 - DNA, 540 bp, Arabidopsis thaliana
atgtcaccggaggaatacgttagggtttggccggattccggtgatcttggaggaactgagctgaccctagctttgcctggcactccgacaaatgcatcggaaggtccaaaaaagttcgggaacaaacgtagattcctcgagaccgttgatttaaaactcggggaagcacacgagaacaattatatctcaagcatggtcactaatgaccagttggtgggctggccgccggtagcgacagcgaggaaaacagtgaggcggaaatacgtgaaagtggcgttggatggtgcggcctatctcagaaaggttgatcttgggatgtacgattgctatggacagcttttcaccgctctagaaaacatgtttcaggggataataacaatatgtagagtgacagagttggagaggaagggagagtttgttgctacttacgaggataaggacggtgacttgatgttagtcggagatgtgccgtggatgatgtttgtggaatcttgcaaacgtatgaggttaatgaaaaccggagatgctattggattatag

SEQ ID NO: 454 - protein, 179 aa, Arabidopsis thaliana
MSPEEYVRVWPDSGDLGGTELTLALPGTPTNASEGPKKFGNKRRFLETVDLKLGEAHENNYISSMVTNDQLVGWPPVATARKTVRRKYVKVALDGAAYLRKVDLGMYDCYGQLFTALENMFQGIITICRVTELERKGEFVATYEDKDGDLMLVGDVPWMMFVESCKRMRLMKTGDAIGL

SEQ ID NO: 455 - DNA, 576 bp, Arabidopsis thaliana
atggacccaaacacacctgcagacttcttcaaaggttcttccaagtttcatacatattactcacagaccaaaaagggtggtggggtaatcgatctaggcctcagccttaggaccatacaacatgaaacttacctcccaccggcgcgaatgataggtctcgacgggtatggagagctcatagactggtcgcagcccagctataacagcattacacagttgaagagtgaggacactggacaccaaagacttgcccaaggatattacaataatgaaggagagagcagaggaaaatatgcttacgtaaaggtaaatctggatggcctagtggtagggcgcaaggtttgccttgttgatcaaggagcttacgcaactcttgctcttcagctcaatgatatgtttgggatgcagaccgtgtcgggattgaggttgttccagactgagtctgagttctctttggtctacagagacagagaaggcatttggaggaatgttggggatgttccatggaaggagtttgtcgaaagcgtggatcggatgcgaatcgcaagaagaaacgatgctcttcttcccttttaa

SEQ ID NO: 456 - protein, 191 aa, Arabidopsis thaliana
MDPNTPADFFKGSSKFHTYYSQTKKGGGVIDLGLSLRTIQHETYLPPARMIGLDGYGELIDWSQPSYNSITQLKSEDTGHQRLAQGYYNNEGESRGKYAYVKVNLDGLVVGRKVCLVDQGAYATLALQLNDMFGMQTVSGLRLFQTESEFSLVYRDREGIWRNVGDVPWKEFVESVDRMRIARRNDALLPF

SEQ ID NO: 457 - DNA, 966 bp, Arabidopsis thaliana
atgtcttatcgattgctaagtgtggataaggatgaactggttacgtcaccttgtttgaaagaacgtaactacttgggtctctctgattgttcctctgttgatagctcaactattcccaatgttgttgggaagagcaatctcaatttcaaagctactgaactgaggctaggtcttcctgagtctcaatctcctgagagagagactgatttcggtttgctgagtccgagaacacccgatgagaagcttctcttcccgttgctaccttctaaagacaatggttctgctactacagggcataagaatgttgtttctggtaacaagagaggatttgctgacacttgggatgagttttcgggtgtgaaaggatctgttagacctggaggaggaatcaacatgatgttgtcgccgaaagttaaggatgtctcgaagagtattcaagaagaaagatctcatgctaagggtggcttgaacaatgcaccagctgccaaggcacaggttgttggttggcctccaatcagatcataccggaagaatacaatggcttcttctacttcgaagaacactgatgaggttgatgggaaacctggtcttggtgttctgtttgtgaaggtgagcatggatggtgctccgtatctgagaaaggtcgacttgagaacttacacttcctatcaacagttgtcttctgcacttgagaaaatgttcagctgcttcacccttggtcaatgtggtcttcatggtgctcaagggagggaaagaatgagcgagattaaactgaaggatcttcttcatggatcagaatttgtgcttacttatgaagataaagacggtgattggatgcttgttggcgatgttccatgggagatatttactgaaacatgccagaaactgaagatcatgaagggttctgattctattggcttagctccaggtgcagtggagaaatcgaagaacaaagagcgggtttga

SEQ ID NO: 458 - protein, 321 aa, Arabidopsis thaliana
MSYRLLSVDKDELVTSPCLKERNYLGLSDCSSVDSSTIPNVVGKSNLNFKATELRLGLPESQSPERETDFGLLSPRTPDEKLLFPLLPSKDNGSATTGHKNVVSGNKRGFADTWDEFSGVKGSVRPGGGINMMLSPKVKDVSKSIQEERSHAKGGLNNAPAAKAQVVGWPPIRSYRKNTMASSTSKNTDEVDGKPGLGVLFVKVSMDGAPYLRKVDLRTYTSYQQLSSALEKMFSCFTLGQCGLHGAQGRERMSEIKLKDLLHGSEFVLTYEDKDGDWMLVGDVPWEIFTETCQKLKIMKGSDSIGLAPGAVEKSKNKERV

SEQ ID NO: 459 - DNA, 960 bp, Arabidopsis thaliana
atgtcttatcgattgctaagtgtggataaggatgaactggttacgtcaccttgtttgaaagaacgtaactacttgggtctctctgattgttcctctgttgatagctcaactattcccaatgttgttgggaagagcaatctcaatttcaaagctactgaactgaggctaggtcttcctgagtctcaatctcctgagagagagactgatttcggtttgctgagtccgagaacacccgatgagaagcttctcttcccgttgctaccttctaaagacaatggttctgctactacagggcataagaatgttgtttctggtaacaagagaggatttgctgacacttgggatgagttttcgggtgtgaaaggatctgttagacctggaggaggaatcaacatgatgttgtcgccgaaagttaaggatgtctcgaagagtattcaagaagaaagatctcatgctaagggtggcttgaacaatgcaccagctgccaaggcacaggttgttggttggcctccaatcagatcataccggaagaatacaatggcttcttctacttcgaagaacactgatgaggttgatgggaaacctggtcttggtgttctgtttgtgaaggtgagcatggatggtgctccgtatctgagaaaggtcgacttgagaacttacacttcctatcaacagttgtcttctgcacttgagaaaatgttcagctgcttcacccttggtcaatgtggtcttcatggtgctcaagggagggaaagaatgagcgagattaaactgaaggatcttcttcatggatcagaatttgtgcttacttatgaagataaagacggtgattggatgcttgttggcgatgttccatgggagatatttactgaaacatgccagaaactgaagatcatgaagggttctgattctattggcttaggtgcagtggagaaatcgaagaacaaagagcgggtttga

SEQ ID NO: 460 - protein, 319 aa, Arabidopsis thaliana
MSYRLLSVDKDELVTSPCLKERNYLGLSDCSSVDSSTIPNVVGKSNLNFKATELRLGLPESQSPERETDFGLLSPRTPDEKLLFPLLPSKDNGSATTGHKNVVSGNKRGFADTWDEFSGVKGSVRPGGGINMMLSPKVKDVSKSIQEERSHAKGGLNNAPAAKAQVVGWPPIRSYRKNTMASSTSKNTDEVDGKPGLGVLFVKVSMDGAPYLRKVDLRTYTSYQQLSSALEKMFSCFTLGQCGLHGAQGRERMSEIKLKDLLHGSEFVLTYEDKDGDWMLVGDVPWEIFTETCQKLKIMKGSDSIGLGAVEKSKNKERV

SEQ ID NO: 461 - DNA, 741 bp, Arabidopsis thaliana
atgattactgaacttgagatggggaaaggtgagagtgagcttgagcttggtctagggctgagtcttggcggtggaacggcggccaagattggtaaatcaggtggtggtggcgcgtggggagagcgtggaaggcttttgacggctaaggattttccttctgttggttctaaacgtgctgctgattctgcttctcatgctggttcatctcctcctcgttcaagtcaagttgttggatggcctcctatagggtcacacaggatgaacagtttggttaataaccaagctacaaagtcagcaagagaagaagaagaagctggtaagaagaaagtgaaagatgatgaacctaaagatgtgacaaagaaagtgaatgggaaagtacaagttggatttattaaggtgaacatggatggagttgctataggaagaaaagtggatttgaatgctcattcttcttacgagaatttggcgcaaacattggaagatatgttctttcgcactaatccgggtactgtcgggttaaccagtcagttcactaaaccgttgaggcttttagatggatcgtctgagtttgtacttacttatgaagataaggaaggagattggatgcttgttggtgatgttccatggagaatgttcatcaactcggtgaaaaggctacgtgtgatgaaaacctctgaagctaatggactcgctgcacgaaatcaagaaccaaacgagagacagcgaaagcagccggtttag

SEQ ID NO: 462 - protein, 246 aa, Arabidopsis thaliana
MITELEMGKGESELELGLGLSLGGGTAAKIGKSGGGGAWGERGRLLTAKDFPSVGSKRAADSASHAGSSPPRSSQVVGWPPIGSHRMNSLVNNQATKSAREEEEAGKKKVKDDEPKDVTKKVNGKVQVGFIKVNMDGVAIGRKVDLNAHSSYENLAQTLEDMFFRTNPGTVGLTSQFTKPLRLLDGSSEFVLTYEDKEGDWMLVGDVPWRMFINSVKRLRVMKTSEANGLAARNQEPNERQRKQPV

SEQ ID NO: 463 - DNA, 744 bp, Arabidopsis thaliana
atgattactgaacttgagatggggaaaggtgagagtgagcttgagcttggtctagggctgagtcttggcggtggaacggcggccaagattggtaaatcaggtggtggtggcgcgtggggagagcgtggaaggcttttgacggctaaggattttccttctgttggttctaaacgtgctgctgattctgcttctcatgctggttcatctcctcctcgttcaagcagtcaagttgttggatggcctcctatagggtcacacaggatgaacagtttggttaataaccaagctacaaagtcagcaagagaagaagaagaagctggtaagaagaaagtgaaagatgatgaacctaaagatgtgacaaagaaagtgaatgggaaagtacaagttggatttattaaggtgaacatggatggagttgctataggaagaaaagtggatttgaatgctcattcttcttacgagaatttggcgcaaacattggaagatatgttctttcgcactaatccgggtactgtcgggttaaccagtcagttcactaaaccgttgaggcttttagatggatcgtctgagtttgtacttacttatgaagataaggaaggagattggatgcttgttggtgatgttccatggagaatgttcatcaactcggtgaaaaggctacgtgtgatgaaaacctctgaagctaatggactcgctgcacgaaatcaagaaccaaacgagagacagcgaaagcagccggtttag

SEQ ID NO: 464 - protein, 247 aa, Arabidopsis thaliana
MITELEMGKGESELELGLGLSLGGGTAAKIGKSGGGGAWGERGRLLTAKDFPSVGSKRAADSASHAGSSPPRSSSQVVGWPPIGSHRMNSLVNNQATKSAREEEEAGKKKVKDDEPKDVTKKVNGKVQVGFIKVNMDGVAIGRKVDLNAHSSYENLAQTLEDMFFRTNPGTVGLTSQFTKPLRLLDGSSEFVLTYEDKEGDWMLVGDVPWRMFINSVKRLRVMKTSEANGLAARNQEPNERQRKQPV

SEQ ID NO: 465 - DNA, 528 bp, Arabidopsis thaliana
atgggaagagggagaagttcatcgtcttcttcaatagagagtagcagcaagagcaacccattcggtgcttcgtcaagtactcgaaacctaagcacggacctgagactcggactcagcttcgggacatcctcagggactcaatatttcaacggtggctatgggtactccgttgcagctccggcggtagaggatgcggaatatgtggcggctgtggaggaggaagaagagaatgagtgtaacagtgtagggagcttttacgtgaaagtgaacatggaaggagttccaattggaagaaagatcgatctaatgtctcttaatggctaccgcgacttgatcagaacccttgatttcatgttcaacgcatccattctctgggctgaagaagaagacatgtgcaatgagaagagtcacgtgctaacgtacgcagataaggaaggtgactggatgatggttggagatgttccttgggagatgttcttgtctactgtgagaagactgaagatttcaagagctaattaccactactga

SEQ ID NO: 466 - protein, 175 aa, Arabidopsis thaliana
MGRGRSSSSSSIESSSKSNPFGASSSTRNLSTDLRLGLSFGTSSGTQYFNGGYGYSVAAPAVEDAEYVAAVEEEEENECNSVGSFYVKVNMEGVPIGRKIDLMSLNGYRDLIRTLDFMFNASILWAEEEDMCNEKSHVLTYADKEGDWMMVGDVPWEMFLSTVRRLKISRANYHY

SEQ ID NO: 467 - DNA, 711 bp, Arabidopsis thaliana
atgattaattttgaggccacggagctgagattagggctaccgggtgggaatcacggaggagaaatggctggaaaaaataatggtaaaagaggattttctgagactgttgatctcaaactgaatctttcatcgacggctatggattcagtttccaaagtcgatttagagaatatgaaggagaaggtcgtaaaaccaccagccaaggcacaagttgtgggatggccaccggtacgatctttccgcaagaacgtcatgtccggccaaaaaccgaccaccggagatgccaccgaaggaaacgataagacttctggcagcagtggagccacctcatccgcctccgcatgtgccaccgtggcttatgtgaaggttagcatggacggtgcaccgtacctacggaaaattgacttgaaactctacaaaacttaccaagatctctccaacgccttaagcaaaatgtttagctcttttaccataggcaactatggaccacaaggaatgaaagatttcatgaatgagagtaaattgatcgatcttctaaacggatcagattatgttccaacatatgaagataaagatggcgactggatgcttgtaggagacgtaccgtgggagatgtttgttgattcatgcaaacgtatacgaataatgaagggatcagaagcaatcggacttgctccaagggcattagaaaagtgcaagaacagaagttga

SEQ ID NO: 468 - protein, 236 aa, Arabidopsis thaliana
MINFEATELRLGLPGGNHGGEMAGKNNGKRGFSETVDLKLNLSSTAMDSVSKVDLENMKEKVVKPPAKAQVVGWPPVRSFRKNVMSGQKPTTGDATEGNDKTSGSSGATSSASACATVAYVKVSMDGAPYLRKIDLKLYKTYQDLSNALSKMFSSFTIGNYGPQGMKDFMNESKLIDLLNGSDYVPTYEDKDGDWMLVGDVPWEMFVDSCKRIRIMKGSEAIGLAPRALEKCKNRS

SEQ ID NO: 469 - DNA, 594 bp, Arabidopsis thaliana
atggagaaggaaggactcgggcttgagataacggagctgagattggggcttccggggagagatgtggcagagaagatgatgaagaagagagctttcacggagatgaatatgacgtcgtcgggtagtaatagtgatcaatgtgaaagcggcgtcgtttcatctggtggtgacgctgagaaggttaatgattcgccggcggcgaaaagccaggtggtggggtggccaccggtttgttcttaccggaagaaaaacagctgtaaggaagcttcgaccacgaaagtggggttagggtatgtgaaagtgagcatggatggtgtgccttatttgaggaagatggatcttggttcgagccaaggctatgatgatctagcctttgctcttgataagctcttcggtttccgtggcatcggtgtggccttgaaagatggtgacaactgcgaatacgttaccatatacgaagacaaagatggagactggatgctcgccggtgatgtaccttgggggatgtttctagagtcatgcaagaggttgagaataatgaaaagatcggatgctaccgggtttgggctgcagcctagaggagtagacgagtga

SEQ ID NO: 470 - protein, 197 aa, Arabidopsis thaliana
MEKEGLGLEITELRLGLPGRDVAEKMMKKRAFTEMNMTSSGSNSDQCESGVVSSGGDAEKVNDSPAAKSQVVGWPPVCSYRKKNSCKEASTTKVGLGYVKVSMDGVPYLRKMDLGSSQGYDDLAFALDKLFGFRGIGVALKDGDNCEYVTIYEDKDGDWMLAGDVPWGMFLESCKRLRIMKRSDATGFGLQPRGVDE

SEQ ID NO: 471 - DNA, 810 bp, Arabidopsis thaliana
atggaaggttgtccaagaaacagagaaatcggtccaaaacttcttgatttgattccacaaggaaggaaatggtaccaagaagacaagaacaacacagatcaggagaagaaacttgagctaaggcttggaccacccggtggtgatgaagaagatcattcagcaatcaagaagaagaacacagagataagaaacatcaagaaggaaacagaagacaaatctttccactgttttaatggcaatcacttctctccttccaacaaaaccacttctgttcctcacatctcacagaaaagaactgctcctggtccagtggtgggttggcctccggttcgttcgttcagaaagaatctagcgagcacaagctcttcaaagctaggtaacgaatcctctcatggaggtcaaatcaacaagagtgatgatggtgaaaaacaagttgaaaccaagaaggaaggaatgtttgtcaagatcaacatggatggtgttcctattggtcgtaaagttgatctcaatgcttacaacagctacgaacagctctcttttgtcgttgacaaactcttcagaggtctactcgcagctcaaagagatatctctgatggtcaaggagaagagaaacctatcattggattattagatgggaaaggagaatttactttaacctatgaagacaatgaaggggacaagatgcttgttggggatgttccatggcaaatgtttgtttcatctgtgaagagactgcgtgtgattaaaagctctgagatttcatctgccttgacatttggatgcagtaagcaagagaagatgatgcactga

SEQ ID NO: 472 - protein, 269 aa, Arabidopsis thaliana
MEGCPRNREIGPKLLDLIPQGRKWYQEDKNNTDQEKKLELRLGPPGGDEEDHSAIKKKNTEIRNIKKETEDKSFHCFNGNHFSPSNKTTSVPHISQKRTAPGPVVGWPPVRSFRKNLASTSSSKLGNESSHGGQINKSDDGEKQVETKKEGMFVKINMDGVPIGRKVDLNAYNSYEQLSFVVDKLFRGLLAAQRDISDGQGEEKPIIGLLDGKGEFTLTYEDNEGDKMLVGDVPWQMFVSSVKRLRVIKSSEISSALTFGCSKQEKMMH

SEQ ID NO: 473 - DNA, 477 bp, Arabidopsis thaliana
atggaggtctctaactcttgttcttcattttcttcatcctctgtcgacagtactaaaccttctccttctgaatcttctgttaatctctcccttagtctcacatttccttctacttctccacaaagagaagcaagacaagattggccaccgataaagtctagattaagagatacactaaagggtcgtcgtcttcttcgtcgtggtgatgacacttctctctttgttaaggtttatatggaaggtgttcccattggaagaaaactcgacctttgcgtattctcaggctacgagagtctattagaaaatctctctcacatgttcgatacttcaatcatctgcggtaatcgagatcgaaaacatcatgttttgacatatgaagacaaggatggagattggatgatggtcggagatattccatgggatatgtttcttgaaaccgtgagaagactaaagatcacgagaccggagaggtattaa

SEQ ID NO: 474 - protein, 158 aa, Arabidopsis thaliana
MEVSNSCSSFSSSSVDSTKPSPSESSVNLSLSLTFPSTSPQREARQDWPPIKSRLRDTLKGRRLLRRGDDTSLFVKVYMEGVPIGRKLDLCVFSGYESLLENLSHMFDTSIICGNRDRKHHVLTYEDKDGDWMMVGDIPWDMFLETVRRLKITRPERY

SEQ ID NO: 475 - DNA, 525 bp, Arabidopsis thaliana
atggcgtacgagaaagtcaacgagcttaaccttaaggacacagagctatgtcttggattacccggaagaacagagaagatcaaagaagaacaagaggtttcttgcgttaaaagtaacaacaagcgtctatttgaggaaactcgtgatgaagaagaatctacacctcctaccaaaactcaaatcgttggttggccaccagtgagatcttcccgtaagaacaacaacagtgtgagctacgtgaaagtgagtatggacggagctccttaccttcgcaagatcgatctcaagacatacaaaaactaccccgagcttctcaaagcgttagagaatatgttcaaagtcatgattggtgaatattgtgagagagaaggatacaaaggatctggatttgtaccaacatacgaagataaagatggtgactggatgttggttggtgatgttccatgggacatgttctcttcttcttgtaagagactcagaatcatgaagggatccgacgctcctgctctagactcttccttatga

SEQ ID NO: 476 - protein, 174 aa, Arabidopsis thaliana
MAYEKVNELNLKDTELCLGLPGRTEKIKEEQEVSCVKSNNKRLFEETRDEEESTPPTKTQIVGWPPVRSSRKNNNSVSYVKVSMDGAPYLRKIDLKTYKNYPELLKALENMFKVMIGEYCEREGYKGSGFVPTYEDKDGDWMLVGDVPWDMFSSSCKRLRIMKGSDAPALDSSL

SEQ ID NO: 477 - DNA, 732 bp, Arabidopsis thaliana
atgatcggccaacttatgaacctcaaggccacggagctctgtctcggcctccccggcggcgctgaagcagttgagagtcctgccaaatcggcggtgggaagcaagagaggcttctccgaaaccgttgatctcatgctcaatcttcaatctaacaaagaaggctccgttgatctcaaaaacgtttctgctgttcccaaggagaagactacccttaaagatccttctaagcctcctgctaaagcacaagtggtgggatggccacctgtgaggaactacaggaagaacatgatgactcagcagaagaccagtagtggtgcggaggaggccagcagtgagaaggccgggaactttggtggaggagcagccggagccggcttggtgaaggtctccatggacggtgctccatatctgaggaaagttgacctcaagatgtacaaaagctaccaggatctttctgatgcattggccaaaatgttcagctcctttactatgggaaactatggagcacaaggaatgatagatttcatgaacgagagcaagctaatgaatctgctgaatagctctgagtatgtgccaagctacgaggacaaagatggtgactggatgctcgttggcgatgtcccatgggaaatgtttgtcgagtcttgcaaacgtttgcgcattatgaagggatctgaagcagttggacttgctccgagagcaatggagaagtactgcaagaacagatcttga

SEQ ID NO: 478 - protein, 243 aa, Arabidopsis thaliana
MIGQLMNLKATELCLGLPGGAEAVESPAKSAVGSKRGFSETVDLMLNLQSNKEGSVDLKNVSAVPKEKTTLKDPSKPPAKAQVVGWPPVRNYRKNMMTQQKTSSGAEEASSEKAGNFGGGAAGAGLVKVSMDGAPYLRKVDLKMYKSYQDLSDALAKMFSSFTMGNYGAQGMIDFMNESKLMNLLNSSEYVPSYEDKDGDWMLVGDVPWEMFVESCKRLRIMKGSEAVGLAPRAMEKYCKNRS

SEQ ID NO: 479 - DNA, 633 bp, Arabidopsis thaliana
atgatcggccaacttatgaacctcaaggccacggagctctgtctcggcctccccggcggcgctgaagcagttgagagtcctgccaaatcggcggtgggaagcaagagaggcttctccgaaaccgttgatctcatgctcaatcttcaatctaacaaagaaggctccgttgatctcaaaaacgtttctgctgttcccaaggagaagactacccttaaagatccttctaagcctcctgctaaagcacaagtggtgggatggccacctgtgaggaactacaggaagaacatgatgactcagcagaagaccagtagtggtgcggaggaggccagcagtgagaaggccgggaactttggtggaggagcagccggagccggcttggtgaaggtctccatggacggtgctccatatctgaggaaagttgacctcaagatgtacaaaagctaccaggatctttctgatgcattggccaaaatgttcagctcctttactatgggaaactatggagcacaaggaatgatagatttcatgaacgagagcaagctaatgaatctgctgaatagctctgagtatgtgccaagctacgaggacaaagatggtgactggatgctcgttggcgatgtcccatgggagtga

SEQ ID NO: 480 - protein, 210 aa, Arabidopsis thaliana
MIGQLMNLKATELCLGLPGGAEAVESPAKSAVGSKRGFSETVDLMLNLQSNKEGSVDLKNVSAVPKEKTTLKDPSKPPAKAQVVGWPPVRNYRKNMMTQQKTSSGAEEASSEKAGNFGGGAAGAGLVKVSMDGAPYLRKVDLKMYKSYQDLSDALAKMFSSFTMGNYGAQGMIDFMNESKLMNLLNSSEYVPSYEDKDGDWMLVGDVPWE

SEQ ID NO: 481 - DNA, 519 bp, Arabidopsis thaliana
atgggaagagggagaagctcatcgtcttcatcgatagagagcagctgcaaaagcaacccatttggtgtgtcttcgagtaatactcggaacctaagcacggacctgagactcgggctcagcttcggatcatcttccggacaatattacaacggtggagataaccatgaatatgatggagtcggtgcggcagaggaaatgatgatcatggaagaagaagagcaaaacgagtgtaatagtgtcggaagcttctacgtgaaagtgaacatggaaggagttcctattgggagaaagatcgatcttttatctcttaatggatatcatgatttgatcacaactctcgactacatgttcaatgcttcaatcctttgggctgaagaagaagatatgtgtagtgagaagagtcacgtgctaacgtacgcagacaaagaaggtgactggatgatggttggagatgttccttgggagatgttcttgtctagcgtgagaagactaaagatctcaagagcttatcactactga

SEQ ID NO: 482 - protein, 172 aa, Arabidopsis thaliana
MGRGRSSSSSSIESSCKSNPFGVSSSNTRNLSTDLRLGLSFGSSSGQYYNGGDNHEYDGVGAAEEMMIMEEEEQNECNSVGSFYVKVNMEGVPIGRKIDLLSLNGYHDLITTLDYMFNASILWAEEEDMCSEKSHVLTYADKEGDWMMVGDVPWEMFLSSVRRLKISRAYHY

SEQ ID NO: 483 - DNA, 687 bp, Arabidopsis thaliana
atgaaccttaaggagacggagctttgtcttggcctccccggaggcactgaaaccgttgaaagtccggccaagtcgggtgttgggaacaagagaggcttctccgagaccgttgatctcaaacttaatcttcaatctaacaaacaaggacatgtggatctcaacactaatggagctcccaaggagaagaccttccttaaagacccttctaagcctcctgctaaagcacaagtggtgggttggccaccggtgaggaactaccggaaaaatgttatggctaatcagaagagcggcgaagcagaggaggcaatgagtagtggtggaggaaccgtcgcctttgtgaaggtttccatggatggagctccttatcttcggaaggttgacctcaagatgtacaccagctacaaggatctctctgatgccttggccaaaatgttcagctcctttaccatggggagttatggagcacaagggatgatagatttcatgaacgagagtaaagtgatggatctgttgaacagttctgagtatgttccaagctacgaggacaaagatggtgactggatgctcgttggtgatgtcccctggccgatgtttgtcgagtcatgcaaacgtttgcgcataatgaaaggatccgaagcaattggacttgctccaagagcaatggagaagttcaagaacagatcatga

SEQ ID NO: 484 - protein, 228 aa, Arabidopsis thaliana
MNLKETELCLGLPGGTETVESPAKSGVGNKRGFSETVDLKLNLQSNKQGHVDLNTNGAPKEKTFLKDPSKPPAKAQVVGWPPVRNYRKNVMANQKSGEAEEAMSSGGGTVAFVKVSMDGAPYLRKVDLKMYTSYKDLSDALAKMFSSFTMGSYGAQGMIDFMNESKVMDLLNSSEYVPSYEDKDGDWMLVGDVPWPMFVESCKRLRIMKGSEAIGLAPRAMEKFKNRS

SEQ ID NO: 485 - DNA, 507 bp, Arabidopsis thaliana
atggaagtcaccaatgggcttaaccttaaggacacagagcttcgtttgggattacccggagcacaagaagaacaacaactagaactttcttgcgtcagaagcaacaacaagcgcaagaacaacgactcaacagaagaatctgctcctcctcctgcaaaaacacaaatcgttggatggcctccagtgagatctaaccgtaagaacaacaacaacaaaaacgtgagttatgtgaaagtgagtatggacggagctccatatctccgtaagatagatctcaagatgtacaaaaactatccagagcttctcaaagcactagagaacatgttcaagttcacagtaggtgaatattccgagagagaaggctacaaaggatctggatttgtacctacttatgaagacaaagatggagattggatgttggtcggtgatgttccatgggacatgttctcttcatcttgtcaaaaactcagaatcatgaaaggatccgaagctcctactgccttatga

SEQ ID NO: 486 - protein, 168 aa, Arabidopsis thaliana
MEVTNGLNLKDTELRLGLPGAQEEQQLELSCVRSNNKRKNNDSTEESAPPPAKTQIVGWPPVRSNRKNNNNKNVSYVKVSMDGAPYLRKIDLKMYKNYPELLKALENMFKFTVGEYSEREGYKGSGFVPTYEDKDGDWMLVGDVPWDMFSSSCQKLRIMKGSEAPTAL

SEQ ID NO: 487 - DNA, 741 bp, Arabidopsis thaliana
atggaaggcggttccgctagtggatcggcttcggctttgtcaaacgatgaaaatctcgtcgtttcttgtgaggattcttcttctcctatagggaatgagcttgagcttggtcttacgttgagccttggtcgcaaagggtatcgagattgtagggtttacgctgatgattcttcttcttcttcatcatcttcttctctgagcagagctagcgtaattgctgggatcaagaggacagctgattccatggctgcaactagtgggcaagttgtgggatggccaccaataaggacttacagaatgaacagtatggttaaccaagctaaggcttcagccactgaagatccgaacttggagataagtcaagccgtaaacaagaatagaagtgattcaacaaagatgagaaattccatgtttgttaaggtgactatggatggcattcctattggaaggaaaatcgatctgaatgctcataaatgctatgaatcattgtcaaacactctagaggaaatgtttctgaaacctaaattaggttcacgcacactagaaaccgatggtcacatggaaacaccggtcaagatactaccagatgggtcttccggattagtactaacgtatgaagacaaggaaggagattggatgcttgttggcgatgttccgtgggggatgtttattggttcagtgagaaggctccggataatgaaaacatcggaggctactggtaaagctcagatgatattatga

SEQ ID NO: 488 - protein, 246 aa, Arabidopsis thaliana
MEGGSASGSASALSNDENLVVSCEDSSSPIGNELELGLTLSLGRKGYRDCRVYADDSSSSSSSSSLSRASVIAGIKRTADSMAATSGQVVGWPPIRTYRMNSMVNQAKASATEDPNLEISQAVNKNRSDSTKMRNSMFVKVTMDGIPIGRKIDLNAHKCYESLSNTLEEMFLKPKLGSRTLETDGHMETPVKILPDGSSGLVLTYEDKEGDWMLVGDVPWGMFIGSVRRLRIMKTSEATGKAQMIL

SEQ ID NO: 489 - DNA, 918 bp, Arabidopsis thaliana
atgtctgtatctgtagcagcagagcatgattacataggtttgtcagagtttccaaccatggaagcaacaacaatgtctgacaaaaccaaaaccagagacaataacaacggtctcaatttcaaggctaccgagttaagactcggtttacccggttctgagtcgccggagcgagtcgactcaagattcttggctctcaacaagagtagctgtcccgtgtcaggtgccaaaagggtgttctccgacgctattaacgactctaacaaatgggtcttctctcctggatccactactgctactggtgatgtcggctcgggttctggtccccgtacctccgtcgttaaagatggaaagtcgacaactttcactaaaccggctgttccggttaaggagaagaagagctctgctacagctccagcttcaaaagcacaagtggtgggatggccaccaataagatcattcaggaagaactcaatggcttcttctcaatctcagaaacctggtaataactcagagactgaagaagcagaagctaagtctggaccagaacaaccttgcttgtatgtcaaagtgagtatggaaggtgctccttacttgaggaaaatcgatctcaagacttacaaaagctaccttgagctctcttctgctcttgagaagatgttcagttgcttcaccattggtcagtttggttctcatggagggtgtggcagagatgggttaaacgagagtcgcttgactgatctcttgcgtggttctgagtatgttgtaacctatgaagataaagacagtgactggatgctggtcggagatgtcccttgggaaatgtttatatgctcctgcaagaagctgagaatcatgaagagctctgaggctatcggcttagctccaagggtgatggagaagtgcagaagcaggaactag

SEQ ID NO: 490 - protein, 305 aa, Arabidopsis thaliana
MSVSVAAEHDYIGLSEFPTMEATTMSDKTKTRDNNNGLNFKATELRLGLPGSESPERVDSRFLALNKSSCPVSGAKRVFSDAINDSNKWVFSPGSTTATGDVGSGSGPRTSVVKDGKSTTFTKPAVPVKEKKSSATAPASKAQVVGWPPIRSFRKNSMASSQSQKPGNNSETEEAEAKSGPEQPCLYVKVSMEGAPYLRKIDLKTYKSYLELSSALEKMFSCFTIGQFGSHGGCGRDGLNESRLTDLLRGSEYVVTYEDKDSDWMLVGDVPWEMFICSCKKLRIMKSSEAIGLAPRVMEKCRSRN

SEQ ID NO: 491 - DNA, 756 bp, Arabidopsis thaliana
atggagttggatcttggtctatctctttcacctcataaatcttccaagttagggtttaactttgacctcaacaagcattgtgcgatcgagggtgctgcgtcttgtttgggtaccgaaaaactgcgttttgaggcgacgtttgggttagggaatgtggaggaaaattgttatatgccaaaacagcgtttgtttgccttgaatggccagcccaacgaggaagacgaagatcctctggaatccgagtcttcaatagtttacgatgatgaggaggaaaatagcgaagttgttggatggccaccagtaaaaacatgtatgataaagtatggtagttatcatcatcgtcatattcgtaatcaccatcattgcccgtatcatcatcgtggtaggaggatcacggcgatgaacaacaacatatctaatccaacaacggctactgtgggatcatcatcttcttcgtcaatatcatcaagatcatcaatgtatgttaaggttaagatggatggtgtggcaatagcaagaaaagtggatatcaagctttttaactcttacgagtccctcactaactccttgatcactatgtttaccgaatatgaagattgcgacagagaagatacaaattatacattcaccttccaagggaaagagggtgactggctacttcgaggggatgttacatggaagatctttgcggaatctgttcatcggatatcaataattagagatcgaccgtgtgcatatacaagatgtttgttttaa

SEQ ID NO: 492 - protein, 251 aa, Arabidopsis thaliana
MELDLGLSLSPHKSSKLGFNFDLNKHCAIEGAASCLGTEKLRFEATFGLGNVEENCYMPKQRLFALNGQPNEEDEDPLESESSIVYDDEEENSEVVGWPPVKTCMIKYGSYHHRHIRNHHHCPYHHRGRRITAMNNNISNPTTATVGSSSSSSISSRSSMYVKVKMDGVAIARKVDIKLFNSYESLTNSLITMFTEYEDCDREDTNYTFTFQGKEGDWLLRGDVTWKIFAESVHRISIIRDRPCAYTRCLF

SEQ ID NO: 493 - DNA, 561 bp, Arabidopsis thaliana
atggaaaaagttgatgtttatgatgagcttgttaacctaaaggcaacagagctgagattgggattaccagggacagaagaaactgtttcttgtggaaaaagcaacaaaagagttttacctgaagctactgagaaagagattgaatccactggaaaaactgaaaccgcttctcctccaaaggctcagattgttggatggccaccagttagatcttacagaaagaacaatgttcagacaaagaagagtgaatctgaaggtcaaggaaactatgtgaaagtaagtatggatggtgctccatatctaaggaagatagatctaacgatgtataaacaatatccagagttgatgaaatcacttgaaaacatgtttaaattctctgtgggagaatattttgagagagaaggatataaaggctcagactttgtacctacttatgaagacaaagatggtgattggatgcttgttggtgatgttccttgggagatgtttgtttcgtcttgtaagaggctaaggatcatgaaaggatctgaagttaaaggtttaggttgtggtggtctttaa

SEQ ID NO: 494 - protein, 186 aa, Arabidopsis thaliana
MEKVDVYDELVNLKATELRLGLPGTEETVSCGKSNKRVLPEATEKEIESTGKTETASPPKAQIVGWPPVRSYRKNNVQTKKSESEGQGNYVKVSMDGAPYLRKIDLTMYKQYPELMKSLENMFKFSVGEYFEREGYKGSDFVPTYEDKDGDWMLVGDVPWEMFVSSCKRLRIMKGSEVKGLGCGGL

SEQ ID NO: 495 - DNA, 516 bp, Arabidopsis thaliana
atgaatagtttcgagccacaaagccaagactctttgcaaagaaggtttcatcaagacaacagcaccacacaacaacctcgtgacaccacgacacctttcatacccaaaccggcttccaaaaaccataataatagcaactccagctctggagcggccgggagatcattccaaggctttgggcttaacgtagaggacgatcttgtttcatcggtggttcctccggttacggttgtgctagagggacgttctatatgtcaacgcataagcctagacaagcatgggagttatcagagcttggcttcggctctaaggcaaatgtttgtcgatggagctgattcaacggacgatcttgatctgtcaaacgccattcctggccatcttattgcttatgaagacatggagaacgatctccttcttgccggagatcttacttggaaggactttgttcgtgtagcgaagagaattcgaatcttgccggtcaagggaaacacaagacaagttaaaagaaacgagtga

SEQ ID NO: 496 - protein, 171 aa, Arabidopsis thaliana
MNSFEPQSQDSLQRRFHQDNSTTQQPRDTTTPFIPKPASKNHNNSNSSSGAAGRSFQGFGLNVEDDLVSSVVPPVTVVLEGRSICQRISLDKHGSYQSLASALRQMFVDGADSTDDLDLSNAIPGHLIAYEDMENDLLLAGDLTWKDFVRVAKRIRILPVKGNTRQVKRNE

SEQ ID NO: 497 - DNA, 1017 bp, Arabidopsis thaliana
atgtccccggaagaggagctacagagcaatgtatcggtggctagttcttcacctactagcaattgcatctccaggaacactctaggaggacttaaagagcataactacttgggtctctctgattgttcttctgttggaagctctactctctctccccttgctgaagatgacaaagctactatcagcctcaaggctacggagctgacacttggtcttcctggatcacaatctcctgcgagagacacagagcttaaccttttgagcccagcaaagctagatgagaagccattctttcctttgcttccttctaaagatgagatatgctcctcctcgcaaaagaacaatgcatcgggaaacaaaagaggcttttctgacacaatggatcagtttgctgaagctaaaagttcagtgtatactgagaaaaactggatgttccctgaagcagcagccacccagtctgtaacaaagaaagatgtgccacaaaacatacccaaaggacagtctagcactacaaacaatagctctagtccacctgcagccaaggcacaaattgtcggttggcctccagtgagatcctacaggaagaacacattggccactacttgtaagaacagtgacgaagttgatgggaggccaggttctggggctctcttcgtgaaggtcagtatggatggtgctccttatctgaggaaagttgacctgaggagctacactaactacggggagctttcttcagccttggagaaaatgttcaccactttcactcttggtcaatgtggatctaatggagctgctgggaaggatatgcttagtgagaccaagctcaaggatcttttgaatggaaaagactatgtgctcacttatgaggataaggatggtgactggatgcttgttggagatgttccgtgggagatgtttattgatgtctgcaagaagctgaagataatgaaagggtgtgatgctattgggttagctgcagctccgagagcaatggagaaatcgaagatgagagcttaa

SEQ ID NO: 498 - protein, 338 aa, Arabidopsis thaliana
MSPEEELQSNVSVASSSPTSNCISRNTLGGLKEHNYLGLSDCSSVGSSTLSPLAEDDKATISLKATELTLGLPGSQSPARDTELNLLSPAKLDEKPFFPLLPSKDEICSSSQKNNASGNKRGFSDTMDQFAEAKSSVYTEKNWMFPEAAATQSVTKKDVPQNIPKGQSSTTNNSSSPPAAKAQIVGWPPVRSYRKNTLATTCKNSDEVDGRPGSGALFVKVSMDGAPYLRKVDLRSYTNYGELSSALEKMFTTFTLGQCGSNGAAGKDMLSETKLKDLLNGKDYVLTYEDKDGDWMLVGDVPWEMFIDVCKKLKIMKGCDAIGLAAAPRAMEKSKMRA

SEQ ID NO: 499 - DNA, 1011 bp, Arabidopsis thaliana
atgtccccggaagaggagctacagagcaatgtatcggtggctagttcttcacctactagcaattgcatctccaggaacactctaggaggacttaaagagcataactacttgggtctctctgattgttcttctgttggaagctctactctctctccccttgctgaagatgacaaagctactatcagcctcaaggctacggagctgacacttggtcttcctggatcacaatctcctgcgagagacacagagcttaaccttttgagcccagcaaagctagatgagaagccattctttcctttgcttccttctaaagatgagatatgctcctcctcgcaaaagaacaatgcatcgggaaacaaaagaggcttttctgacacaatggatcagtttgctgaagctaaaagttcagtgtatactgagaaaaactggatgttccctgaagcagcagccacccagtctgtaacaaagaaagatgtgccacaaaacatacccaaaggacagtctagcactacaaacaatagctctagtccacctgcagccaaggcacaaattgtcggttggcctccagtgagatcctacaggaagaacacattggccactacttgtaagaacagtgacgaagttgatgggaggccaggttctggggctctcttcgtgaaggtcagtatggatggtgctccttatctgaggaaagttgacctgaggagctacactaactacggggagctttcttcagccttggagaaaatgttcaccactttcactcttggtcaatgtggatctaatggagctgctgggaaggatatgcttagtgagaccaagctcaaggatcttttgaatggaaaagactatgtgctcacttatgaggataaggatggtgactggatgcttgttggagatgttccgtgggagatgtttattgatgtctgcaagaagctgaagataatgaaagggtgtgatgctattgggttagctccgagagcaatggagaaatcgaagatgagagcttaa

SEQ ID NO: 500 - protein, 336 aa, Arabidopsis thaliana
MSPEEELQSNVSVASSSPTSNCISRNTLGGLKEHNYLGLSDCSSVGSSTLSPLAEDDKATISLKATELTLGLPGSQSPARDTELNLLSPAKLDEKPFFPLLPSKDEICSSSQKNNASGNKRGFSDTMDQFAEAKSSVYTEKNWMFPEAAATQSVTKKDVPQNIPKGQSSTTNNSSSPPAAKAQIVGWPPVRSYRKNTLATTCKNSDEVDGRPGSGALFVKVSMDGAPYLRKVDLRSYTNYGELSSALEKMFTTFTLGQCGSNGAAGKDMLSETKLKDLLNGKDYVLTYEDKDGDWMLVGDVPWEMFIDVCKKLKIMKGCDAIGLAPRAMEKSKMRA

SEQ ID NO: 501 - DNA, 600 bp, Oryza sativa
atgtcggtggagacggagcggagctccacggagtcgtccgccgcgtcggggctcgacttcgaggacaccgccctcaccctccgcctcccgggctccctcgccgccgccgccgcacctgaccccgaccgcaagcgctcctccccctcctcctccgacgccgccgacgccgcagacaactcctcccccctcgccgccgccgccgatgctccccctgctcccaaggcgagggtggtggggtggccgccggtgaggtcgttcaggaagaacgcgctggcggccaagttcgtgaaggtggccgtggacggcgcgccgtacctgcgcaaggtggacctcgaggcctactccggctacgaccagctcctccgcgcgctccaggacaagttcttctcccacttcaccatccggaagttcgccgacgacgagaggaagctggtggacgcggtgaacgggacggagtacgtgccgacgtacgaggacaaggacggcgactggatgctcgtcggcgacgtcccctggaagatgtttgtggaaacttgccagcgccttcgtctcatgaaaagctcagaggctgtcaacttagcaccaagagccgctcaatga

SEQ ID NO: 502 - protein, 199 aa, Oryza sativa
MSVETERSSTESSAASGLDFEDTALTLRLPGSLAAAAAPDPDRKRSSPSSSDAADAADNSSPLAAAADAPPAPKARVVGWPPVRSFRKNALAAKFVKVAVDGAPYLRKVDLEAYSGYDQLLRALQDKFFSHFTIRKFADDERKLVDAVNGTEYVPTYEDKDGDWMLVGDVPWKMFVETCQRLRLMKSSEAVNLAPRAAQ

SEQ ID NO: 503 - DNA, 792 bp, Oryza sativa
atgtcgccgcccctcgagctcgactacataggcctctcgcctccgccgccgccgccctcctcctcctccgccgccgccgcccgcgcggacgacgtcgacctgaagggcaccgagctccgcctcggcctccctggctccgagtcgccggaccgccgccctgcggctattgccgctgccgctgccactgccaccacccttgagctgctgcccgccaagggtgccaagcgcgtgttccccgacgaggccgcgctgacgccgcccactgccgccgccgggaagggcaaggcggcgagggagggggaggaggtgggggctgaggaggaggacaagaaggtcgccgcgccgccgcagccggctgcgaaggctcaggtggtgggatggccaccaatccgcagctaccgcaagaacacgatggcaaccaaccagataaagagcaacaaggaggatgttgatgctaagcagggtcagggtttcctgtacgtcaaggttagcatggatggtgcaccatatctgaggaaggtggacctcaaaacttacaagaactacaaggacatgtctttgggtctcgagaaaatgttcattggcttcagcaccggtaaggaaggtgctgagaaccagaaagatggtgaatatgtgttaacctacgaagacaaggatggtgactggatgctggttggtgatgttccatgggagatgttcaccgactcttgccggaggctcagaatcatgaaaggctcagatgcaattggacttgccccaagagcaggggaaaagtccaagaacaggaactag

SEQ ID NO: 504 - protein, 263 aa, Oryza sativa
MSPPLELDYIGLSPPPPPPSSSSAAAARADDVDLKGTELRLGLPGSESPDRRPAAIAAAAATATTLELLPAKGAKRVFPDEAALTPPTAAAGKGKAAREGEEVGAEEEDKKVAAPPQPAAKAQVVGWPPIRSYRKNTMATNQIKSNKEDVDAKQGQGFLYVKVSMDGAPYLRKVDLKTYKNYKDMSLGLEKMFIGFSTGKEGAENQKDGEYVLTYEDKDGDWMLVGDVPWEMFTDSCRRLRIMKGSDAIGLAPRAGEKSKNRN

SEQ ID NO: 505 - DNA, 792 bp, Oryza sativa; identical to SEQ ID NO: 503

SEQ ID NO: 506 - protein, 263 aa, Oryza sativa; identical to SEQ ID NO: 504

SEQ ID NO: 507 - DNA, 612 bp, Oryza sativa
atggaggagtgcaagggcggtggcatgtcgccgtcctcctccatggatagcagcacccacccggcgctgtccacgacgtcgtcggcggcgacggcgaggcgggacctcagcaccgatctccggctagggcttagcctctcgacgtcgtcgtcgtcctccctcctgcaggccgccgccgccgccgccgctgctgatgatagcatcccttctactccaaggaacagccaagtgcacgccgattggccgccgatcaagccgttcctcaggagcgccttgcagaaggcgtcggccgctggcggcggcggcgctcgccgacggcgaacgctgttcgtgaaggtgtacatggagggcgtcccgatcggccggaagctcgacctgctcttgctggatgggtatgacagcctcctcatcaagctctgccacatgttcaagacgcccatcacctatgctgatgttatggagtgccatcaacaagttcctggccagaaggctgcccatgtcctcacctatgaagaccaggacggggactggatgatggttggggacgtcccatgggaactcttcctgagcagcgtaaagaagctcaggattgcaaggatggataaatgctaa

SEQ ID NO: 508 - protein, 203 aa, Oryza sativa
MEECKGGGMSPSSSMDSSTHPALSTTSSAATARRDLSTDLRLGLSLSTSSSSSLLQAAAAAAAADDSIPSTPRNSQVHADWPPIKPFLRSALQKASAAGGGGARRRRTLFVKVYMEGVPIGRKLDLLLLDGYDSLLIKLCHMFKTPITYADVMECHQQVPGQKAAHVLTYEDQDGDWMMVGDVPWELFLSSVKKLRIARMDKC

SEQ ID NO: 509 - DNA, 816 bp, Oryza sativa
atgtcgcctcccctcgagccgcacgactacatcggcctctccgctgcggcggcgtccccgacgccgagctcgtcgtcctgctcgtcctcgccgaacccaggcggcgaggcccgcggcccacgcctcacgctccgcctcggcctcccggggtcggagtcccccgagcgggaggtcgtcgccgcggggctcaccctcgggcctctgcccccgaccaccaccaaggcggcctccaagcgcgccttccccgactcctccccgcggcacggcgccagctccggctccgtcgccgccgccgcagcttgccaggacaaggcggcccccgccgccgctccgccggctgcaaaggcgcaggtggtgggatggccgcccgtgcggaactaccgaaagaacacgctggcggcgagcgcctccaagggcaaaggggaggacaagggcacggctgaagggggccctctctatgtcaaggtgagcatggatggagccccctacctcaggaaggtcgacctcaagatgtattctagctatgaggacctctccatggctctcgagaagatgttcagctgcttcatcactggtcaaagcggtttgcgtaaatcatcaaacagagataggcttactaatggttcaaaggctgatgccctccaagaccaagagtatgtccttacatatgaagataaggatgctgactggatgcttgttggtgatcttccttgggatttgtttaccactatctgccggaaattgaaaatcatgagaggatctgatgctgctggaatagctccaagatcaatagagcagtcagggcagagcagataa

SEQ ID NO: 510 - protein, 271 aa, Oryza sativa
MSPPLEPHDYIGLSAAAASPTPSSSSCSSSPNPGGEARGPRLTLRLGLPGSESPEREVVAAGLTLGPLPPTTTKAASKRAFPDSSPRHGASSGSVAAAAACQDKAAPAAAPPAAKAQVVGWPPVRNYRKNTLAASASKGKGEDKGTAEGGPLYVKVSMDGAPYLRKVDLKMYSSYEDLSMALEKMFSCFITGQSGLRKSSNRDRLTNGSKADALQDQEYVLTYEDKDADWMLVGDLPWDLFTTICRKLKIMRGSDAAGIAPRSIEQSGQSR

SEQ ID NO: 511 - DNA, 786 bp, Oryza sativa
atggaagaagggtccaacaaaagagaaggacttcctcctcaactcctagatctcatcccagatgagaaggaatggaagctgagagaagcattaggtctagggagatcaagaaacgcaggcttcgacggtgaagaagacaagaagctagacctaaagcttggtcttcctggttttatagaagatgatgaggcagaaaccttaagagattacaggctacagcaagagagcccatctctctcccttagtttctttccaaagcactccaagaccaccagcagcactactacgacaactggagcaaagaggggattcatagacacagttgaggacaaaacagaaggttataacgaccagaagcagcaggcaagggcaggatgtgggaaggaacttgcagtggaggaaatgatagcagccgtgagtgagaggaagaaaggatgctgccccccaccaccaccaccacatggtgctcctgctacacctgcgcgcaacagaccacagacccagggaagaggagctgcagcaccagtggttggttggcctccaattcgatccttcaggagaaaccttgctagtagtagttcatccaaacattcccctgaaccacaaaatgataatgccaatgcaaaggtgacgctcacctgcaagaaaaaccctcttgtaaaaatcaacatggatgggatccctattggaaggaaaatagaccttgcagcctataacagctatgatgggctatcgtcagctgtcaaacaactcttccatgggtttcttcaagcaaggtgcagatga

SEQ ID NO: 512 - protein, 261 aa, Oryza sativa
MEEGSNKREGLPPQLLDLIPDEKEWKLREALGLGRSRNAGFDGEEDKKLDLKLGLPGFIEDDEAETLRDYRLQQESPSLSLSFFPKHSKTTSSTTTTTGAKRGFIDTVEDKTEGYNDQKQQARAGCGKELAVEEMIAAVSERKKGCCPPPPPPHGAPATPARNRPQTQGRGAAAPVVGWPPIRSFRRNLASSSSSKHSPEPQNDNANAKVTLTCKKNPLVKINMDGIPIGRKIDLAAYNSYDGLSSAVKQLFHGFLQARCR

SEQ ID NO: 513 - DNA, 618 bp, Oryza sativa
atggagtgcatggcgagtactgaagagtctctcccagcttcttcctccatggatagttgcagcggcgaactgccgacgacgacgacgacggcgccggcgcaatccacggcgtcttccggctgccgaccgccggcgacggcggcgaagcggcggagtctgatcagcacagatcttcgcctcgggctcaccctctcctccgtcgtccacatcgacggcaacaacccttctaccccaaggagttccctcacgacggcgacagtgacagctgatcgaggcggcggcggcggcggccatggacggcgacggtcactgttcgtgaaggtgtacatggagggcgtccccatcggcaggaagctggacctgctgccgctggacggctacaaaggtctcgtcgcacggctcgcctccatgttcagagcatccatcacctatcatcattgccatcgacagttcgccgtcgtcgggatgaagacgaacaaggttcatcatgttctgacatacgaagaccaggagggagactggatgatggctggagacgtgccatgggagctgttcctgacaagcgtgaagagattgaggattgcaagagcggatgacaagtactgctatagctgttga

SEQ ID NO: 514 - protein, 205 aa, Oryza sativa
MECMASTEESLPASSSMDSCSGELPTTTTTAPAQSTASSGCRPPATAAKRRSLISTDLRLGLTLSSVVHIDGNNPSTPRSSLTTATVTADRGGGGGGHGRRRSLFVKVYMEGVPIGRKLDLLPLDGYKGLVARLASMFRASITYHHCHRQFAVVGMKTNKVHHVLTYEDQEGDWMMAGDVPWELFLTSVKRLRIARADDKYCYSC

SEQ ID NO: 515 - DNA, 549 bp, Oryza sativa
atggagctggagcttgggctggcgccaccgaattccggtcatctcgtcgtcgacgagctcagcagcagcagcagcagcggcggcggcagcggcagcgcgccggtgtctgcctcgtcggccgggaagaggggattcagggaggcgttccaggagacgctgctgctcttcgacgacggcagctgctgcaacaccagcgacgacgattgcaggaggaggaagaagacggtggtggggtggccaccggtgagctcggcgcggcgggcgtgcggcggcgccaactacgtgaaggtgaagaaggaaggcgacgccatcgggaggaaggttgatttggccctccattcctcctacgacgagctcgctgccacgctcgcccgcatgttccccaccaacgaccaccaaggcgagaagaaaatggccaatgatgatcatggcgatgccgctggacctgtggtcacctacgaggatggtgatggggattggatgctggttggggacgtgccatgggatgattttgcacgatctgtgaaacgcctgaagatactgggttaa

SEQ ID NO: 516 - protein, 182 aa, Oryza sativa
MELELGLAPPNSGHLVVDELSSSSSSGGGSGSAPVSASSAGKRGFREAFQETLLLFDDGSCCNTSDDDCRRRKKTVVGWPPVSSARRACGGANYVKVKKEGDAIGRKVDLALHSSYDELAATLARMFPTNDHQGEKKMANDDHGDAAGPVVTYEDGDGDWMLVGDVPWDDFARSVKRLKILG

SEQ ID NO: 517 - DNA, 846 bp, Oryza sativa
atgagaggaggagtagctgggcccaccgccggcgagccgccggggacggaggcggaggcggaggaggtggaggagagctcagctggggacgacgaggagctggagctcgggctcagccttggctccaagaaacagcagcagcagcagcatgcgccgtgccgaatcctgacggccagggacctgcagccggcggcggcgctgtcaccggactcctccgtgtcgtcgtcatcccccgcggcggcggcggcggcgggggggaagagggctgagggccccaccgccaccacctcgcctgggacggttgcttccggccatccacacagcagctttggagtggtgggatggccaccgatccgacagttcaggatgaacagcctgttcaatcaggctaaagaaaacacatctgaaaccgacaccaagaagaccgccaccaatgaatctgatgtgcagaaggacaaggaggagggcgaaaagaaaggacgggttgctggatgggtgaaggtgaacatggatggagaggtcattggaaggaaggtggatctcaatgcgcaccgctcatacaagacccttgcattagcccttgaactcatgttcacgaagccgtccattggcctttgcgcttctcataatacaaactcgctgaaactactagacaactctgccgaataccagctcacctacgaggacagggatggtgactggatgctcgttggagatgttccttgggaaatgtttgtcagctctgtgaagaggttgaggatcatgaggacatcagatgcgaatggtcttggtcagcgataccagggaattcacagaaccattgcttcaacaagaggcagatcctga

SEQ ID NO: 518 - protein, 281 aa, Oryza sativa
MRGGVAGPTAGEPPGTEAEAEEVEESSAGDDEELELGLSLGSKKQQQQQHAPCRILTARDLQPAAALSPDSSVSSSSPAAAAAAGGKRAEGPTATTSPGTVASGHPHSSFGVVGWPPIRQFRMNSLFNQAKENTSETDTKKTATNESDVQKDKEEGEKKGRVAGWVKVNMDGEVIGRKVDLNAHRSYKTLALALELMFTKPSIGLCASHNTNSLKLLDNSAEYQLTYEDRDGDWMLVGDVPWEMFVSSVKRLRIMRTSDANGLGQRYQGIHRTIASTRGRS

SEQ ID NO: 519 - DNA, 843 bp, Oryza sativa
atgagaggaggagtagctgggcccaccgccggcgagccgccggggacggaggcggaggcggaggaggtggaggagagctcagctggggacgacgaggagctggagctcgggctcagccttggctccaagaaacagcagcagcagcagcatgcgccgtgccgaatcctgacggccagggacctgcagccggcggcggcgctgtcaccggactcctccgtgtcgtcgtcatcccccgcggcggcggcggcggcgggggggaagagggctgagggccccaccgccaccacctcgcctgggacggttgcttccggccatccacacagctttggagtggtgggatggccaccgatccgacagttcaggatgaacagcctgttcaatcaggctaaagaaaacacatctgaaaccgacaccaagaagaccgccaccaatgaatctgatgtgcagaaggacaaggaggagggcgaaaagaaaggacgggttgctggatgggtgaaggtgaacatggatggagaggtcattggaaggaaggtggatctcaatgcgcaccgctcatacaagacccttgcattagcccttgaactcatgttcacgaagccgtccattggcctttgcgcttctcataatacaaactcgctgaaactactagacaactctgccgaataccagctcacctacgaggacagggatggtgactggatgctcgttggagatgttccttgggaaatgtttgtcagctctgtgaagaggttgaggatcatgaggacatcagatgcgaatggtcttggtcagcgataccagggaattcacagaaccattgcttcaacaagaggcagatcctga

SEQ ID NO: 520 - protein, 280 aa, Oryza sativa
MRGGVAGPTAGEPPGTEAEAEEVEESSAGDDEELELGLSLGSKKQQQQQHAPCRILTARDLQPAAALSPDSSVSSSSPAAAAAAGGKRAEGPTATTSPGTVASGHPHSFGVVGWPPIRQFRMNSLFNQAKENTSETDTKKTATNESDVQKDKEEGEKKGRVAGWVKVNMDGEVIGRKVDLNAHRSYKTLALALELMFTKPSIGLCASHNTNSLKLLDNSAEYQLTYEDRDGDWMLVGDVPWEMFVSSVKRLRIMRTSDANGLGQRYQGIHRTIASTRGRS

SEQ ID NO: 521 - DNA, 702 bp, Oryza sativa
atggctggcctcgggttcgacgagaccgagctccggctcggccttcccggcgccggcgagctggcagcgaggagctccggcaagaggggcttcgccgagaccatcgacctcaagctcaagctgcagccggcggcgcctgctgccgtctctggggaagagggtgctcaggaggacaaggaagatgccgacgcggcggcggcggccgccgacgagaagatgtcgatgaagaggtcggcgagccagagcagcgtggtcaccgcggagcccgatcccgacaagccgcgcgcgcccaaggcgcaggtggtggggtggccgccggtccggtcgttcaggaagaacgtgctcgccgagaaatgcaaggcggcggcgctggtgaaggtgagcatggacggcgcgccgtacctgaggaagatcgacgtcgccatgtacaagagctacccggagttgtccatggcgttccagaacatgttcacctccttcaccatcggcaagtgtgggtcccatcagcagctgaaggagagcaataagctgagagatgacctggagtacgtgccgacgtacgaggacaaggacggcgactggatgctcgtcggcgacgtcccgtgggagatgttcgtcgagtcgtgcaaacgcctccgaatcatgaaagggtctgaagccattggccttgcaccaagggcagtggagaaatgcaagagctga

SEQ ID NO: 522 - protein, 233 aa, Oryza sativa
MAGLGFDETELRLGLPGAGELAARSSGKRGFAETIDLKLKLQPAAPAAVSGEEGAQEDKEDADAAAAAADEKMSMKRSASQSSVVTAEPDPDKPRAPKAQVVGWPPVRSFRKNVLAEKCKAAALVKVSMDGAPYLRKIDVAMYKSYPELSMAFQNMFTSFTIGKCGSHQQLKESNKLRDDLEYVPTYEDKDGDWMLVGDVPWEMFVESCKRLRIMKGSEAIGLAPRAVEKCKS

SEQ ID NO: 523 - DNA, 681 bp, Oryza sativa
atggaagccgccgtggggtacgccgccgacagcctcatcaaggccaccgagctcaggctgggcctgcctgggacagccgacgacctgccctccacgcccaggggcaagaagcgcgccgccgcggcggaggacaacaacgccaacgccgccgccgccgacgacgacgagcacgacgccgtcgaggccgcgccgccggtagccaaggctcaagtggtcgggtggccgccggtgaggtcgtacaggaagagctgcttccagcaacagtcagcggcggcgagcaagagcaaggccgccgtgagcagctgcaacaacaaagacgagcccatcaccaagaacgcggcgccggcgccggcagcctcctcggcggcggcggccaacggcgggtcgctggtgaaggtgagcatggacggggcgccgtacctgaggaagatcgacctgaggatgtacaagggctacagggagctccgcgaggccctggaggccatgttcgtctgcttctccggcgccgccgacggtgccaacccgtcggagttcgccatcacctaccaggacaaggacggcgacctcatgctcgtcggcgacgtccctttcgacatgttcaccagcacatgcaagaagttgaggatcatgaagagatctgaagccacagggctaggatcaccaaggcaaatgaagatctaa

SEQ ID NO: 524 - protein, 226 aa, Oryza sativa
MEAAVGYAADSLIKATELRLGLPGTADDLPSTPRGKKRAAAAEDNNANAAAADDDEHDAVEAAPPVAKAQVVGWPPVRSYRKSCFQQQSAAASKSKAAVSSCNNKDEPITKNAAPAPAASSAAAANGGSLVKVSMDGAPYLRKIDLRMYKGYRELREALEAMFVCFSGAADGANPSEFAITYQDKDGDLMLVGDVPFDMFTSTCKKLRIMKRSEATGLGSPRQMKI

SEQ ID NO: 525 - DNA, 711 bp, Oryza sativa
atggccggcgccgacgtggacgtcgggacggagctccggctggggctgcccggaggtggcggcggcgccgccgaggcggcggccaaggccgcgaagaggggcttcgaggagaccattgacctgaagctgaagctgcccaccgccggcatggaggaggccgccgccggcaaggcggaggcgccggccgccgagaaggccaagaggccggcggaggccgccgccgccgacgccgagaagccacctgctcccaaggcgcaggcagtgggttggccaccagttcggtcgttccgcaggaacatcatgaccgtccagtcagtgaagagcaagaaggaagaggaagctgacaagcagcagcagcagcccgctgccaatgccagcggcagcaacagctctgccttcgtgaaggtcagcatggacggggcaccctacctgcgcaaggtggacctgaagatgtacaacagctacaaggacctctcccttgctctgcagaagatgttcggcaccttcaccgcaactgggaacaatatgaatgaggtgaatggctctgatgctgttacaacttatgaagacaaggatggtgactggatgcttgttggagatgtcccgtggcagatgtttgtcgagtcatgcaaacgcttgaggatcatgaagggttccgaagccattggtcttgcaccaagagcaaaggacaagtacaagaacaagagctga

SEQ ID NO: 526 - protein, 236 aa, Oryza sativa
MAGADVDVGTELRLGLPGGGGGAAEAAAKAAKRGFEETIDLKLKLPTAGMEEAAAGKAEAPAAEKAKRPAEAAAADAEKPPAPKAQAVGWPPVRSFRRNIMTVQSVKSKKEEEADKQQQQPAANASGSNSSAFVKVSMDGAPYLRKVDLKMYNSYKDLSLALQKMFGTFTATGNNMNEVNGSDAVTTYEDKDGDWMLVGDVPWQMFVESCKRLRIMKGSEAIGLAPRAKDKYKNKS

SEQ ID NO: 527 - DNA, 594 bp, Oryza sativa
atggccatggcggcggagagcatcgacgcggagctgcgcctcgggctgcccggcagcggcggcggtgacggcgtggcggcgaagaagcggcggtcggcgtcgtcgacggtgaagagcgaggcctccggcacggcctgctgcggcggcgccggcgcccgggacgtcgaagacggcgcctcgccggcgtccaaagtgcaggtggtggggtggccgccggtggggtcgtacaggaggagcacgttccagtcttcgtcgtcgtcgacggcggcggcggcgaaggggaagggcggcggcgagacggatcaagggaggaagaataagggaggagggctgtacgtgaaggtgagcatggacggggcgccatacctccgcaaggtcgacctccggatgtacggcggctacagggagctcagggacgctctcgacgcgctcttcggctgcttctccgccgacgcctccgcctccgccgcccacttcgccgtcgcctatgaggacaaggacggcgacctcatgctcgccggcgacgtgccctgggacatgttcatctcttcttgcaagaagctgcggataatgcgaggatctgaggcgagatga

SEQ ID NO: 528 - protein, 197 aa, Oryza sativa
MAMAAESIDAELRLGLPGSGGGDGVAAKKRRSASSTVKSEASGTACCGGAGARDVEDGASPASKVQVVGWPPVGSYRRSTFQSSSSSTAAAAKGKGGGETDQGRKNKGGGLYVKVSMDGAPYLRKVDLRMYGGYRELRDALDALFGCFSADASASAAHFAVAYEDKDGDLMLAGDVPWDMFISSCKKLRIMRGSEAR

SEQ ID NO: 529 - DNA, 756 bp, Oryza sativa
atgtcggtggagacggagcggagctcgacggagtcatcggcggcgtccgggctcgacttcgaggacaccgccctcaccctccgcctcccgggctcctcctcctcctcctcctcctcctcgtcatcctcctcctcctcgtcgccgtcggagcccgaccgcaagcgcgcctccgccaccgacgacgaccccgacaaccgcctcggctccaccgccaccgagtcccccccttcccccaaggcgcgggtggtcgggtggccgccggtgcgcgcgttccggaagaacgcgctcgcggcgttggcggcggcgtcctccagcaaggccaagttcgtgaaggtggccgtcgacggcgcgccgtacctgcgcaaggtggacctcgaggcgtaccggggctacgaccagctgctcgccgccctccaggacaagttcttctcccacttcaccatccgcaagctcgggaacgaggagatgaagctcgtcgacgcggtgagcggcaacgagtacgtgccgacgtacgaggacaaggacggcgactggatgctcgtcggagacgtcccctggaaaatgtttgtggagacctgccaacgtcttcgtctcatgaaaagctctgaagcagtcaatttaggtacagtgtcctcttggtcttgtatgttgtttttcatagttgccaccgtgactttctgtatggttcaacaacgtattttcgggcaaaatcctaaattttcccccttctcacatgcagcaccaagatctgcttga

SEQ ID NO: 530 - protein, 251 aa, Oryza sativa
MSVETERSSTESSAASGLDFEDTALTLRLPGSSSSSSSSSSSSSSSSPSEPDRKRASATDDDPDNRLGSTATESPPSPKARVVGWPPVRAFRKNALAALAAASSSKAKFVKVAVDGAPYLRKVDLEAYRGYDQLLAALQDKFFSHFTIRKLGNEEMKLVDAVSGNEYVPTYEDKDGDWMLVGDVPWKMFVETCQRLRLMKSSEAVNLGTVSSWSCMLFFIVATVTFCMVQQRIFGQNPKFSPFSHAAPRSA

SEQ ID NO: 531 - DNA, 639 bp, Oryza sativa
atgtcggtggagacggagcggagctcgacggagtcatcggcggcgtccgggctcgacttcgaggacaccgccctcaccctccgcctcccgggctcctcctcctcctcctcctcctcctcgtcatcctcctcctcctcgtcgccgtcggagcccgaccgcaagcgcgcctccgccaccgacgacgaccccgacaaccgcctcggctccaccgccaccgagtcccccccttcccccaaggcgcgggtggtcgggtggccgccggtgcgcgcgttccggaagaacgcgctcgcggcgttggcggcggcgtcctccagcaaggccaagttcgtgaaggtggccgtcgacggcgcgccgtacctgcgcaaggtggacctcgaggcgtaccggggctacgaccagctgctcgccgccctccaggacaagttcttctcccacttcaccatccgcaagctcgggaacgaggagatgaagctcgtcgacgcggtgagcggcaacgagtacgtgccgacgtacgaggacaaggacggcgactggatgctcgtcggagacgtcccctggaaaatgtttgtggagacctgccaacgtcttcgtctcatgaaaagctctgaagcagtcaatttagcaccaagatctgcttga

SEQ ID NO: 532 - protein, 212 aa, Oryza sativa
MSVETERSSTESSAASGLDFEDTALTLRLPGSSSSSSSSSSSSSSSSPSEPDRKRASATDDDPDNRLGSTATESPPSPKARVVGWPPVRAFRKNALAALAAASSSKAKFVKVAVDGAPYLRKVDLEAYRGYDQLLAALQDKFFSHFTIRKLGNEEMKLVDAVSGNEYVPTYEDKDGDWMLVGDVPWKMFVETCQRLRLMKSSEAVNLAPRSA

SEQ ID NO: 533 - DNA, 603 bp, Oryza sativa
atgtcggtggagacggagcggagctcgacggagtcatcggcggcgtccgggctcgacttcgaggacaccgccctcaccctccgcctcccgggctcctcctcctcctcctcctcctcctcgtcatcctcctcctcctcgtcgccgtcggagcccgaccgcaagcgcgcctccgccaccgacgacgaccccgacaaccgcctcggctccaccgccaccgagtcccccccttcccccaaggcgcgggtggtcgggtggccgccggtgcgcgcgttccggaagaacgcgctcgcggcgttggcggcggcgtcctccagcaaggccaagttcgtgaaggtggccgtcgacggcgcgccgtacctgcgcaaggtggacctcgaggcgtaccggggctacgaccagctgctcgccgccctccaggacaagttcttctcccacttcaccatccctcgggaacgaggagatgaagctcgtcgacgcggtgagcggcaacgagtacgtgccgacgtacgaggacaaggacggcgactggatgctcgtcggagacgtcccctggaaaatgtttgtggagacctgccaacgtcttcgtctcatgaaaagctctga

SEQ ID NO: 534 - protein, 200 aa, Oryza sativa
MSVETERSSTESSAASGLDFEDTALTLRLPGSSSSSSSSSSSSSSSSPSEPDRKRASATDDDPDNRLGSTATESPPSPKARVVGWPPVRAFRKNALAALAAASSSKAKFVKVAVDGAPYLRKVDLEAYRGYDQLLAALQDKFFSHFTIPRERGDEARRRGERQRVRADVRGQGRRLDARRRRPLENVCGDLPTSSSHEKL

SEQ ID NO: 535 - DNA, 567 bp, Oryza sativa
atgtcggtggagacggagcggagctcgacggagtcatcggcggcgtccgggctcgacttcgaggacaccgccctcaccctccgcctcccgggctcctcctcctcctcctcctcctcctcgtcatcctcctcctcctcgtcgccgtcggagcccgaccgcaagcgcgcctccgccaccgacgacgaccccgacaaccgcctcggctccaccgccaccgagtcccccccttcccccaaggcgcgggtggtcgggtggccgccggtgcgcgcgttccggaagaacgcgctcgcggcgttggcggcggcgtcctccagcaaggccaagttcgtgaaggtggccgtcgacggcgcgccgtacctgcgcaaggtggacctcgaggcgtaccggggctacgaccagctgctcgccgccctccaggacaagttcttctcccacttcaccatccgtgagtcgacatgctcgtgcgcctctgtgcctttccgctgttcttgcgcgatgccgtacgttgttgagagctctggatgcgttcgtccatggccgcaggcaagctcgggaacgaggagatga

SEQ ID NO: 536 - protein, 188 aa, Oryza sativa
MSVETERSSTESSAASGLDFEDTALTLRLPGSSSSSSSSSSSSSSSSPSEPDRKRASATDDDPDNRLGSTATESPPSPKARVVGWPPVRAFRKNALAALAAASSSKAKFVKVAVDGAPYLRKVDLEAYRGYDQLLAALQDKFFSHFTIRESTCSCASVPFRCSCAMPYVVESSGCVRPWPQASSGTRR

SEQ ID NO: 537 - DNA, 564 bp, Oryza sativa
atgtcggtggagacggagcggagctcgacggagtcatcggcggcgtccgggctcgacttcgaggacaccgccctcaccctccgcctcccgggctcctcctcctcctcctcctcctcctcgtcatcctcctcctcctcgtcgccgtcggagcccgaccgcaagcgcgcctccgccaccgacgacgaccccgacaaccgcctcggctccaccgccaccgagtcccccccttcccccaaggcgcgggtggtcgggtggccgccggtgcgcgcgttccggaagaacgcgctcgcggcgttggcggcggcgtcctccagcaaggccaagttcgtgaaggtggccgtcgacggcgcgccgtacctgcgcaaggtggacctcgaggcgtaccggggctacgaccagctgctcgccgccctccaggacaagttcttctcccacttcaccatccgcaagctcgggaacgaggagatgaagctcgtcgacgcggtgagcggcaacgagtacgtgccgacgtacgaggacaaggacggcgactggatgctcgtcggagacgtcccctggaagtga

SEQ ID NO: 538 - protein, 187 aa, Oryza sativa
MSVETERSSTESSAASGLDFEDTALTLRLPGSSSSSSSSSSSSSSSSPSEPDRKRASATDDDPDNRLGSTATESPPSPKARVVGWPPVRAFRKNALAALAAASSSKAKFVKVAVDGAPYLRKVDLEAYRGYDQLLAALQDKFFSHFTIRKLGNEEMKLVDAVSGNEYVPTYEDKDGDWMLVGDVPWK

SEQ ID NO: 539 - DNA, 426 bp, Oryza sativa
atggcgcgtcgcggcgggcgcagggcgcgggtggtcgggtggccgccggtgcgcgcgttccggaagaacgcgctcgcggcgttggcggcggcgtcctccagcaaggccaagttcgtgaaggtggccgtcgacggcgcgccgtacctgcgcaaggtggacctcgaggcgtaccggggctacgaccagctgctcgccgccctccaggacaagttcttctcccacttcaccatccgcaagctcgggaacgaggagatgaagctcgtcgacgcggtgagcggcaacgagtacgtgccgacgtacgaggacaaggacggcgactggatgctcgtcggagacgtcccctggaaaatgtttgtggagacctgccaacgtcttcgtctcatgaaaagctctgaagcagtcaatttagcaccaagatctgcttga

SEQ ID NO: 540 - protein, 141 aa, Oryza sativa
MARRGGRRARVVGWPPVRAFRKNALAALAAASSSKAKFVKVAVDGAPYLRKVDLEAYRGYDQLLAALQDKFFSHFTIRKLGNEEMKLVDAVSGNEYVPTYEDKDGDWMLVGDVPWKMFVETCQRLRLMKSSEAVNLAPRSA

SEQ ID NO: 541 - DNA, 687 bp, Oryza sativa
atggcttggaatggcaggtttggagaggatggagaggaagagaggagccttgagctcagccttgccctccctggatacttctccagctcaggtttgcaggggaacacgagcactgctgctgatggagccaagggaaacgatgggttcaaggcaagcaggccggcggctccggtggtcgggtggccgccggtgcggtcgttccggcggaacctcgcctcgtcgtcgtcgtcgtcgaagccgccgcgtggaggccgagacgccgccgccgccgccacgggaggcaaggtggcccggttcgtcaaggtgaacatggacggcgtcccgatcggccggaaggtcgacctggcggcgcacggcggctacggcgagctctccgccgccgtcgaccgtctcttccgcggcctcctcgccgctcaaagggacccaaccatggccaccgccgccgccgccgccgctgccggcgagagctgcacaggagaggaggaggcgatcgccgggctcctcgacggcggcagcggcgagtacacgctcgtctacgaggacgacgagggcgaccagatgctcgtcggcgacgtgccatggaacatgttcatcgccgcggcgaggaggctgcgcgtgctcaggagctccgacctgaacgcctccacgatacgagcagggagcaggaagagggcagctgccgagtga

SEQ ID NO: 542 - protein, 228 aa, Oryza sativa
MAWNGRFGEDGEEERSLELSLALPGYFSSSGLQGNTSTAADGAKGNDGFKASRPAAPVVGWPPVRSFRRNLASSSSSSKPPRGGRDAAAAATGGKVARFVKVNMDGVPIGRKVDLAAHGGYGELSAAVDRLFRGLLAAQRDPTMATAAAAAAAGESCTGEEEAIAGLLDGGSGEYTLVYEDDEGDQMLVGDVPWNMFIAAARRLRVLRSSDLNASTIRAGSRKRAAAE

SEQ ID NO: 543 - DNA, 774 bp, Oryza sativa
atgtcgcccccactcgagctcgactacataggcctctcgccgccggtgcccgccgccgccgatgccgccgccgacaacgacctgaagggcaccgagctccgcctcggcctgcccggctcccactcgccggaccgctccccgcccgccgccacgctcgaccttctccccgctgccaagggcgccaagcgcgggttctccgacgaggcgcgtccgctgccggcgtccgccgccgccgccgccgccgccgggaagggcaagaaggcggcggccggcgaggaggatgaggatgcggaggaggaggacaagaaggtcgccgccgcgccgcaggcgcctgctgccaaggctcaggtggttggatggccaccaattcgcagctaccgcaagaacacgatggctactaaccagctgaagagcagcaaggaggatgctgaagcgaagcagggccaggggttcctgtacgtcaaggtcagcatggatggtgccccctacctcaggaaggtggacctcaagacctacaagaactacaaggacctgtcaactgcgcttgagaagatgttcattggcttcacaactggcaaggatggcttatctgagagccgcaaggatggtgaatatgtgctgacttatgaagacaaggatggagactggatgcttgttggcgatgttccatgggagatgtttgccaactcttgtcgcagactcaggatcatgaaaggttcagatgcaattggacttgctccaagggcagttgataagtccaaaaaccgcaactag

SEQ ID NO: 544 - protein, 257 aa, Oryza sativa
MSPPLELDYIGLSPPVPAAADAAADNDLKGTELRLGLPGSHSPDRSPPAATLDLLPAAKGAKRGFSDEARPLPASAAAAAAAGKGKKAAAGEEDEDAEEEDKKVAAAPQAPAAKAQVVGWPPIRSYRKNTMATNQLKSSKEDAEAKQGQGFLYVKVSMDGAPYLRKVDLKTYKNYKDLSTALEKMFIGFTTGKDGLSESRKDGEYVLTYEDKDGDWMLVGDVPWEMFANSCRRLRIMKGSDAIGLAPRAVDKSKNRN

SEQ ID NO: 545 - DNA, 708 bp, Oryza sativa
atgtcgcccccactcgagctcgactacataggcctctcgccgccggtgcccgccgccgccgatgccgccgccgacaacgacctgaagggcaccgagctccgcctcggcctgcccggctcccactcgccggaccgctccccgcccgccgccacgctcgaccttctccccgctgccaagggcgccaagcgcgggttctccgacgaggcgcgtccgctgccggcgtccgccgccgccgccgccgccgccgggaagggcaagaaggcggcggccggcgaggaggatgaggatgcggaggaggaggacaagaaggtcgccgccgcgccgcaggcgcctgctgccaaggctcaggtggttggatggccaccaattcgcagctaccgcaagaacacgatggctactaaccagctgaagagcagcaaggaggatgctgaagcgaagcagggccaggggttcctgtacgtcaaggtcagcatggatggtgccccctacctcaggaaggtggacctcaagacctacaagaactacaaggacctgtcaactgcgcttgagaagatgttcattggcttcacaactggtgagatgtctcgggttaccctgcttgcatttctctttgtaattgcatttccttttgatgtggatgctcttacaattacatcgtctaggatgcctgtgactaggaaccaatatatgcttgatctgtacaagtaa

SEQ ID NO: 546 - protein, 235 aa, Oryza sativa
MSPPLELDYIGLSPPVPAAADAAADNDLKGTELRLGLPGSHSPDRSPPAATLDLLPAAKGAKRGFSDEARPLPASAAAAAAAGKGKKAAAGEEDEDAEEEDKKVAAAPQAPAAKAQVVGWPPIRSYRKNTMATNQLKSSKEDAEAKQGQGFLYVKVSMDGAPYLRKVDLKTYKNYKDLSTALEKMFIGFTTGEMSRVTLLAFLFVIAFPFDVDALTITSSRMPVTRNQYMLDLYK

SEQ ID NO: 547 - DNA, 846 bp, Oryza sativa
atgccgccgccgctcgaagcgcgagactacatcgggctcgcggcgtccccggcctcgtcctcctcctcctgctgcgcgtcgacccccgtcgccgaggtcgtcggggcgcacctcgcgctccgcctcggcctcccggggtcggagtcgcccgcccgcgctgaggcggaggctgtcgtcgtcgacgccgcgctcacgctcggccctgctcctcctcccaggggcggcgccaagcgcgggttcgtcgactccctcgaccgatccgagggccgtcgtgctgctgccaccgccggtgatgatgagaggggcgtgagggaggaggaggaggaggagaaggggttgggggaagctgctgctggagctccgcgagctgccaaggcacaagttgttggatggccacctgtgcgaagctaccggaagaatacattggccgccagtgccacaaagacaaagggggaagaccaaggcaaaagtgaggtaggatgttgctatgttaaggttagcatggatggagccccataccttaggaaggttgacctcaagacctattcaagctatgaagatctttcacttgctcttgagaagatgttcagctgctttatcactggtaggagcagttcacataaaacatcaaaaagagacaggctgactgatggttctagggctgatgcccttaaggaccaagagtatgttcttacctatgaagacaaggatgctgactggatgcttgttggtgatcttccttgggacttgtttactactagttgtcggaaactgcggatcatgagaggttcagatgctgctggaatggctccgagatcactggaacagacaggtcagaacaaatag

SEQ ID NO: 548 - protein, 281 aa, Oryza sativa
MPPPLEARDYIGLAASPASSSSSCCASTPVAEVVGAHLALRLGLPGSESPARAEAEAVVVDAALTLGPAPPPRGGAKRGFVDSLDRSEGRRAAATAGDDERGVREEEEEEKGLGEAAAGAPRAAKAQVVGWPPVRSYRKNTLAASATKTKGEDQGKSEVGCCYVKVSMDGAPYLRKVDLKTYSSYEDLSLALEKMFSCFITGRSSSHKTSKRDRLTDGSRADALKDQEYVLTYEDKDADWMLVGDLPWDLFTTSCRKLRIMRGSDAAGMAPRSLEQTGQNK

SEQ ID NO: 549 - DNA, 552 bp, Oryza sativa
atggagctcgagctcggcctcaggctcgcgctgccgtcgccgtcgccgtcgccggcgacggcgacggcggctgggagtgagcttgaccttctcaacagcgcgccggggtcctgccgcaagaggggcttcgaggaggcgctcggtgggttcaaaaccgacgacgacaacgacgacggcaatggccgcggcggtgacggcgattccgacggcgaaatgggcaacaagaggaggaagctggtggggtggccaccggtgaagtgcttgcaccggcggcgcgacggtggctgcggtggcggatatgtgaaggtgaagatggaggggttggccatcgggaggaagctggacttgtccatcctcggctcatacgctgagctgctcgacacgctccaccttatgttcccctccactaaccaagaggatgggcacgatcgtcgtcgacgtcacccatacgctgtcacctacgaggatggggaaggagactggatgcaggtcggagacgtgccatgggaggcctttgccaagtcggtgaaacggctcaagatactggtgtaa

SEQ ID NO: 550 - protein, 183 aa, Oryza sativa
MELELGLRLALPSPSPSPATATAAGSELDLLNSAPGSCRKRGFEEALGGFKTDDDNDDGNGRGGDGDSDGEMGNKRRKLVGWPPVKCLHRRRDGGCGGGYVKVKMEGLAIGRKLDLSILGSYAELLDTLHLMFPSTNQEDGHDRRRRHPYAVTYEDGEGDWMQVGDVPWEAFAKSVKRLKILV

SEQ ID NO: 551 - DNA, 801 bp, Oryza sativa
atggcgccgccacaggagcgggactacatcgggctgtcgccggcggcggcggcggcgctggcaacggagctgcgccttgggctgccggggactgcggaggaggctgagtcggagggcggcggaggaggagggacggatgcggctccgctgacgctcgagctgctgcccaagggcggggccaagcgcgggttcgcggacgccatcgttgggggtcccgccggccagcggcgggaggcggccgggggcaaggcggcggcggcggcggcggaggccgaggaggaggaggagaagaagaaggcgcaggcgccggcggcgaaggcacaggtggtaggatggccaccaatccgcagctacaggaagaacaccatggcgatgagccagcctgctctgaaaggcaaagacgacggcgaggcgaagcaggctccggcatccggttgcctctatgtcaaggtgagcatggatggtgctccttacctcaggaaggtggacctcaagatgtacaagaactacaaggagctctctttggctctggagaagatgttcagctgctttaccgtcggtcatggtgaatcaaatgggaagtcagggagagatggattatctgattgccgcctgatggatcttaaaaatggaacagaacttgtgctcacttatgaggacaaggatgaagattggatgcttgttggtgatgttccgtggcgaatgttcacagacagctgtaggaggctgaggattatgaaggggtcagatgcagtgggccttgctccaagagccactgacaagagcaaaaatcggaactga

SEQ ID NO: 552 - protein, 266 aa, Oryza sativa
MAPPQERDYIGLSPAAAAALATELRLGLPGTAEEAESEGGGGGGTDAAPLTLELLPKGGAKRGFADAIVGGPAGQRREAAGGKAAAAAAEAEEEEEKKKAQAPAAKAQVVGWPPIRSYRKNTMAMSQPALKGKDDGEAKQAPASGCLYVKVSMDGAPYLRKVDLKMYKNYKELSLALEKMFSCFTVGHGESNGKSGRDGLSDCRLMDLKNGTELVLTYEDKDEDWMLVGDVPWRMFTDSCRRLRIMKGSDAVGLAPRATDKSKNRN

SEQ ID NO: 553 - DNA, 450 bp, Oryza sativa
atgttcagagaaaaccgcgcggcttcatcagctcagctggtgggatggccaccggtgcgcacattccgcaagaacctgtccaccccaaaacctgcagatgcagatgacctgatgaacaagatgaagccctgctctgatgaaggccatggctccagagatgcagcccaagagaggaggccatcatcaaccatgtttgtgaaggtgaacctggagggctacgctgtcggaaggaagatcgacctgaaggcgcaccgcagctacgactcgctgtcccaggctctgcagagcatgttccatggcttcttgtcagatggcattgcaactagagacaatgagctgcagcggatggaggagggcagcaagaagaggtatgttcttgtgtatgaggataatgagggagaccgcatgctcgtcggcgacgtcccatgggagtacgtttgtttgctttga

SEQ ID NO: 554 - protein, 149 aa, Oryza sativa
MFRENRAASSAQLVGWPPVRTFRKNLSTPKPADADDLMNKMKPCSDEGHGSRDAAQERRPSSTMFVKVNLEGYAVGRKIDLKAHRSYDSLSQALQSMFHGFLSDGIATRDNELQRMEEGSKKRYVLVYEDNEGDRMLVGDVPWEYVCLL

SEQ ID NO: 555 - DNA, 582 bp, Oryza sativa
atgtcgacgagctccggcgccgactcgtccccgcccgtctcgggcctcgactacgacgacaccgccctcaccctcgccctccccggctcctcctcctcctcctcctccaccgccgaccccgaacgcaagcgcgccgcccacgccgaccacgccgacgccaagccgccttccccaaaggcgcgggcggtggggtggccgccggtgagggcgtacaggcggaacgcgctgcgggaggactccgcgagggcgaagctggtcaaggtggccgtggacggcgcgccgtacctgcgcaaggtggacctcgcggcgcacgccggctacgcgcccctcctccgcgcgctccacggcatgttcgcctcctgcctcgccgtccgcggcggcggcggcggcgacggcgagggtacaaagctcgtcgacttggtcaccggcgccgagtacgtgcccacctacgaggacaaggacggcgactggatgctcgtcggcgacgtcccctggaagatgttcgtcgagtcctgcaagcggatccgtctcatgaagagctccgaggccgtcaacttatcgccaagacgatcatccagataa

SEQ ID NO: 556 - protein, 193 aa, Oryza sativa
MSTSSGADSSPPVSGLDYDDTALTLALPGSSSSSSSTADPERKRAAHADHADAKPPSPKARAVGWPPVRAYRRNALREDSARAKLVKVAVDGAPYLRKVDLAAHAGYAPLLRALHGMFASCLAVRGGGGGDGEGTKLVDLVTGAEYVPTYEDKDGDWMLVGDVPWKMFVESCKRIRLMKSSEAVNLSPRRSSR

SEQ ID NO: 557 - DNA, 501 bp, Oryza sativa
atgtcgacgagctccggcgccgactcgtccccgcccgtctcgggcctcgactacgacgacaccgccctcaccctcgccctccccggctcctcctcctcctcctcctccaccgccgaccccgaacgcaagcgcgccgcccacgccgaccacgccgacgccaagccgccttccccaaaggcgcgggcggtggggtggccgccggtgagggcgtacaggcggaacgcgctgcgggaggactccgcgagggcgaagctggtcaaggtggccgtggacggcgcgccgtacctgcgcaaggtggacctcgcggcgcacgccggctacgcgcccctcctccgcgcgctccacggcatgttcgcctcctgcctcgccgtccgcggcggcggcggcggcgacggcgagggtacaaagctcgtcgacttggtcaccggcgccgagtacgtgcccacctacgaggacaaggacggcgactggatgctcgtcggcgacgtcccctggaagtaa

SEQ ID NO: 558 - protein, 166 aa, Oryza sativa
MSTSSGADSSPPVSGLDYDDTALTLALPGSSSSSSSTADPERKRAAHADHADAKPPSPKARAVGWPPVRAYRRNALREDSARAKLVKVAVDGAPYLRKVDLAAHAGYAPLLRALHGMFASCLAVRGGGGGDGEGTKLVDLVTGAEYVPTYEDKDGDWMLVGDVPWK

SEQ ID NO: 559 - DNA, 660 bp, Oryza sativa
atggcgtcttcttcttctctcaggagcaccagctgcctcgcctccgccgcggagaccgacgccgacaacctctgcctccgcctcggcccgccgggaagcagcatcaccaccaccaccaccaccggcggcgccgacccggcggcgaagaggtccctcggggcgaagcggtcgctggagagcacggacagcatggcctccggcaccggaacttccgccgccggcgacgagcacgacgacgacaccgccgcaccggccaaggcacaggtggtaggatggccaccagtgagggcataccggaggaacaccttccatcaggccgccgccgccgccgccgcaaccaagaagggtggtgatgagaaacagaagcagcagcagcagggaggagggctgtatgtgaaggtgagcatggatggggcaccatacctgaggaaggttgatctcaagatgtgcaagggctacagggagctgagggaggcactggatctcctcttcaccaagtgcttctctgcaaccgcctctgacggatgcagcgatggccagttcgccattgcctacgaggacaaggacggtgacctcatgcttgttggagatgtgccctgggaaatgttcatctcttcctgcaagaagttgaggatcatgaagggctctgaagccaggtga

SEQ ID NO: 560 - protein, 219 aa, Oryza sativa
MASSSSLRSTSCLASAAETDADNLCLRLGPPGSSITTTTTTGGADPAAKRSLGAKRSLESTDSMASGTGTSAAGDEHDDDTAAPAKAQVVGWPPVRAYRRNTFHQAAAAAAATKKGGDEKQKQQQQGGGLYVKVSMDGAPYLRKVDLKMCKGYRELREALDLLFTKCFSATASDGCSDGQFAIAYEDKDGDLMLVGDVPWEMFISSCKKLRIMKGSEAR

SEQ ID NO: 561 - DNA, 606 bp, Oryza sativa
atggcgtcttcttcttctctcaggagcaccagctgcctcgcctccgccgcggagaccgacgccgacaacctctgcctccgcctcggcccgccgggaagcagcatcaccaccaccaccaccaccggcggcgccgacccggcggcgaagaggtccctcggggcgaagcggtcgctggagagcacggacagcatggcctccggcaccggaacttccgccgccggcgacgagcacgacgacgacaccgccgcaccggccaaggcacaggtggtaggatggccaccagtgagggcataccggaggaacaccttccatcaggccgccgccgccgccgccgcaaccaagaagggtggtgatgagaaacagaagcagcagcagcagggaggagggctgtatgtgaaggtgagcatggatggggcaccatacctgaggaaggttgatctcaagatgtgcaagggctacagggagctgagggaggcactggatctcctcttcaccaagtgcttctctgcaaccgcctctgacggatgcagcgatggccagttcgccattgcctacgaggacaaggacggtgacctcatgcttgttggagatgtgccctgggagtaa

SEQ ID NO: 562 - protein, 201 aa, Oryza sativa
MASSSSLRSTSCLASAAETDADNLCLRLGPPGSSITTTTTTGGADPAAKRSLGAKRSLESTDSMASGTGTSAAGDEHDDDTAAPAKAQVVGWPPVRAYRRNTFHQAAAAAAATKKGGDEKQKQQQQGGGLYVKVSMDGAPYLRKVDLKMCKGYRELREALDLLFTKCFSATASDGCSDGQFAIAYEDKDGDLMLVGDVPWE

SEQ ID NO: 563 - DNA, 741 bp, Oryza sativa
atgaagagctcttcagttgcaccaaggctgaaacaggagagacaagatgactgtaagtttcaggaaggtgatgtgaacagccttgagcttcggcttggcatatcttccgacaatgaccagatcagtggtggtggtgctgctagtccatggcttggtgtgggagtgcacccttggagcctggctgcaaggcaagggaaggcagccttggagcaagctcaccagaggcctaatgaatgtgctgtccaaagagaaaaccgcgcggcttcatcagctcagctggtgggatggccaccggtgcgcgcattccgcaagaacctgtccaccccaaaacctgcagatgcagatgacctgatgaacaaggtgaagctctgctctgatgagggccatggctccagatgtgcagcccaagagaggaggtcatcatcaaccatgtttgtgaaggtgaacctggagggctatgctgtcggaaggaagatcgacctgaaggcgcaccgcagctatgactctctgtcccaggctctgcagagcatgttccatggcttcttgtcagatggcattgcaactagagacaatgagctgcagcagatggaggagggcagcaagaagaggtatgttcttgtgtatgaggataatgagggagaccgcatgctcgtcggcgacgtcccatgggagctgttcattgcttcagtgaagaggctctacattgctcaggatcctagagttcatgcgaagctacgataa

SEQ ID NO: 564 - protein, 246 aa, Oryza sativa
MKSSSVAPRLKQERQDDCKFQEGDVNSLELRLGISSDNDQISGGGAASPWLGVGVHPWSLAARQGKAALEQAHQRPNECAVQRENRAASSAQLVGWPPVRAFRKNLSTPKPADADDLMNKVKLCSDEGHGSRCAAQERRSSSTMFVKVNLEGYAVGRKIDLKAHRSYDSLSQALQSMFHGFLSDGIATRDNELQQMEEGSKKRYVLVYEDNEGDRMLVGDVPWELFIASVKRLYIAQDPRVHAKLR

SEQ ID NO: 565 - DNA, 423 bp, Oryza sativa
atggcgagctacggcgacgacggcgtggagctcaccgagctgacgctggggcctcccggagccagcgctcgcagggccaggcgcggcaggaagaacggccatccgccgccgtcgtcctcgatgattcaggcagcgtacttcgtgaaggtgagcatggacgggacgccgtacctgaggaaggtggacgtcgcggcgtacggcgactacctcgagctcgtcgaggcgctcaacgacatgttctactgctccaccattggactgatggacgggtacggcgagtgggagcacgccgtcgtgtacgaggacggcgacggcgactggatgctcgtcggcgacgtgccctgggagatgttcgtgtcttcgtgtaagaggatgagagtgatgcgagcttgtgaggcgagaggcttgagctcaaacgcgtga

SEQ ID NO: 566 - protein, 140 aa, Oryza sativa
MASYGDDGVELTELTLGPPGASARRARRGRKNGHPPPSSSMIQAAYFVKVSMDGTPYLRKVDVAAYGDYLELVEALNDMFYCSTIGLMDGYGEWEHAVVYEDGDGDWMLVGDVPWEMFVSSCKRMRVMRACEARGLSSNA

SEQ ID NO: 567 - DNA, 1056 bp, Oryza sativa
atgatgaatcttatatcatttgaaacacctcctcttgggaggaggagtcaagatggaggcagcagcagcagcagcatcactgctgctacaaccactaccaacaaggcaaaggaagcagcaagccatctagacctcagcctcggcatctccttgtcacccggcggcggcggcggcgacgctggcaccaaggccagcagctgctgctacggcggcggcggcgacggcggcggctgcatgggcagtggcatgctcactgcaggagttcttggcgttgggcatggggggagtagccatgacaatactacggcgagcagcggcggcggcggcagctggacggcggcgttcatgccgagcccgacgggattcatgcacccgtggagcctcgccgcccggcagcagaaggccgccgccgagcaggagcggagcggcgtcgcgaggctgccgccggcgacgacgacgtacatgccaagagctgccgcgaccgtgatttcactgccggcggcagttggctggccaccggtgcacacatcccggcgtaacctcgttgccaccataaataatgtcctgaaacccgacactactgccgccgtcaagccggacagaccgacacaagcaacggcgatgttcgccgccgacgaaaccacggcgcccccgccaaggagcgcggcggcggcgaccgaggccagcaggacattgaacatgtttgccaaggtgcacatggatgggtacaaggtgggcaggaagatcaacctcagggcacaccgcaactacgactccctccgtcgggtcctcaccaagatgactcataatttcttctgccccgcagattattcaagcacaaataagggagaagaagattgtgctaaaagtgacgagttcatatttctatatgaagattttgagggcgaccgaatgcttgttggcgatgtcccatgggagttgttccttgcatcagcaaaaaggttgtacattgccaaaaacccagcacccagaaacaaaggtacctacagacctcttgtctggatatgcatgctgcttccaaaagctccatattga

SEQ ID NO: 568 - protein, 351 aa, Oryza sativa
MMNLISFETPPLGRRSQDGGSSSSSITAATTTTNKAKEAASHLDLSLGISLSPGGGGGDAGTKASSCCYGGGGDGGGCMGSGMLTAGVLGVGHGGSSHDNTTASSGGGGSWTAAFMPSPTGFMHPWSLAARQQKAAAEQERSGVARLPPATTTYMPRAAATVISLPAAVGWPPVHTSRRNLVATINNVLKPDTTAAVKPDRPTQATAMFAADETTAPPPRSAAAATEASRTLNMFAKVHMDGYKVGRKINLRAHRNYDSLRRVLTKMTHNFFCPADYSSTNKGEEDCAKSDEFIFLYEDFEGDRMLVGDVPWELFLASAKRLYIAKNPAPRNKGTYRPLVWICMLLPKAPY

SEQ ID NO: 569 - DNA, 834 bp, Oryza sativa
atggcggcggacctggccttcgaggcgaccgagctccggctcggcctgcccggcggcggcggtgatggagacgccgcggcggcggcggcgaggagctcctccgggaagaggggcttcgccgagaccatcgacctcaagctgaagctggagccggcggccgcggcggtggacgacgacgacgacaaggaggaggcggcggctgacgaccgggagaagaaggtcgacatcgtcggagctgacaacgacgacgcctcgccgccggccgccgccgccgccggcgggatgaagcggtcgccgagccagagcagcgtcgtcaccgccgccgccgaccccgagaagccaagggctcccaaggcacaggtggttgggtggccgccggtccggtcataccggaagaacatcctggccgtgcaggccgacaagggcaaggacgccgccgacggcggcggcgacaagtccggcgccggcgccgccgccgccgccttcgtgaaggtgagcatggacggcgcgccatacctgcgcaaggtggacctcaagatgtacaagagctaccttgagctctccaaggcactcgagaagatgttcagctccttcaccattggaaactgtgggtctcatggggtgaacggcatgaacgagagcaagattgctgatctgctcaacggctctgaatatgtgccaacctacgaggacaaggacggcgactggatgctcgtcggcgacgtcccatgggagatgtttgttgaatcatgcaagcgccttaggataatgaaaggatcagaagctattggccttgcaccgagggcaatggagaaatgcaagaacagaagctga

SEQ ID NO: 570 - protein, 277 aa, Oryza sativa
MAADLAFEATELRLGLPGGGGDGDAAAAAARSSSGKRGFAETIDLKLKLEPAAAAVDDDDDKEEAAADDREKKVDIVGADNDDASPPAAAAAGGMKRSPSQSSVVTAAADPEKPRAPKAQVVGWPPVRSYRKNILAVQADKGKDAADGGGDKSGAGAAAAAFVKVSMDGAPYLRKVDLKMYKSYLELSKALEKMFSSFTIGNCGSHGVNGMNESKIADLLNGSEYVPTYEDKDGDWMLVGDVPWEMFVESCKRLRIMKGSEAIGLAPRAMEKCKNRS

SEQ ID NO: 571 - DNA, 594 bp, Oryza sativa
atggagaatctgaaggcgacggagctgaggctcgggctgccggggacggaggaggaggcggcgccgccgccgtcgacgcccagggccggaagcaagcgcgccctcgccggcgagcctgatcaggccaagatcaagcccgccgccgccgccaaggcgcaggtggtgggatggccgccggtgaggtcgtacaggaagagctgcctccagccgacgacgacgacgacgaagagcaagccgccgccggctgccgcggcggcggagacgcagcagaaggaggatgtcgccggcgccggtgggctgttcgtgaaggtgagcatggacggagctccatacctgaggaagatagacctcaaggtgtacaagggctaccgggagcttcgcgaggcactggaggccatgttcctctgcttctccggcggcgccgccgccgacgccgccgtcaacccgtccgacttcgccgtcacctacgaggacaaggacggcgacctcatgctcgtcggcgacgtcccattcgagatgttcattagtacgtgcaagaggttgaggatcatgaaggggtctgaagcaagaggcctaggagcaacaaggggttaa

SEQ ID NO: 572 - protein, 197 aa, Oryza sativa
MENLKATELRLGLPGTEEEAAPPPSTPRAGSKRALAGEPDQAKIKPAAAAKAQVVGWPPVRSYRKSCLQPTTTTTKSKPPPAAAAAETQQKEDVAGAGGLFVKVSMDGAPYLRKIDLKVYKGYRELREALEAMFLCFSGGAAADAAVNPSDFAVTYEDKDGDLMLVGDVPFEMFISTCKRLRIMKGSEARGLGATRG

SEQ ID NO: 573 - DNA, 546 bp, Oryza sativa
atgtcggtggagacggagcggagctccacggagtcgtccgccgcgtcggggctcgacttcgaggacaccgccctcaccctccgcctcccgggctccctcgccgccgccgccgcacctgaccccgaccgcaagcgctcctccccctcctcctccgacgccgccgacgccgcagacaactcctcccccctcgccgccgccgccgatgctccccctgctcccaaggcgagggtggtggggtggccgccggtgaggtcgttcaggaagaacgcgctggcggccaagttcgtgaaggtggccgtggacggcgcgccgtacctgcgcaaggtggacctcgaggcctactccggctacgaccagctcctccgcgcgctccaggacaagttcttctcccacttcaccatcccaattgacgggaggaaagttgcagggaagttcgccgacgacgagaggaagctggtggacgcggtgaacgggacggagtacgtgccgacgtacgaggacaaggacggcgactggatgctcgtcggcgacgtcccctggaagtga

SEQ ID NO: 574 - protein, 181 aa, Oryza sativa
MSVETERSSTESSAASGLDFEDTALTLRLPGSLAAAAAPDPDRKRSSPSSSDAADAADNSSPLAAAADAPPAPKARVVGWPPVRSFRKNALAAKFVKVAVDGAPYLRKVDLEAYSGYDQLLRALQDKFFSHFTIPIDGRKVAGKFADDERKLVDAVNGTEYVPTYEDKDGDWMLVGDVPWK

SEQ ID NO: 575 - DNA, 801 bp, Oryza sativa
atgtcgccgcccctcgagctcgactacataggcctctcgcctccgccgccgccgccctcctcctcctccgccgccgccgcccgcgcggacgacgtcgacctgaagggcaccgagctccgcctcggcctccctggctccgagtcgccggaccgccaccctgcggctattgccgctgccgctgccactgccaccacccttgagctgctgcccgccaagggtgccaagcgcgtgttccccgacgaggccgcgctgacgccgcccactgccgccgccgggaagggcaaggcggcgagggagggggaggaggtgggggctgaggaggaggacaagaaggtcgccgcgccgccgcagccggctgcgaaggctcaggtggtgggatggccaccaatccgcagctaccgcaagaacacgatggcaaccaaccagataaagagcaacaaggaggatgttgatgctaagcagggtcagggtttcctgtacgtcaaggttagcatggatggtgcaccatatctgaggaaggtggacctcaaaacttacaagaactacaaggacatgtctttgggtctcgagaaaatgttcattggcttcagcaccggtaaggaaggtgctgagaaccagaaagatggtgaatatgtgttaacctacgaagacaaggatggtgactggatgctggttggtgatgttccatgggagatgttcaccgactcttgccggaggctcagaatcatgaaaggctcagatgcaattggacttggctgttctcaactaaggcttgttccattatttgtgccaaagctttag

SEQ ID NO: 576 - protein, 266 aa, Oryza sativa
MSPPLELDYIGLSPPPPPPSSSSAAAARADDVDLKGTELRLGLPGSESPDRHPAAIAAAAATATTLELLPAKGAKRVFPDEAALTPPTAAAGKGKAAREGEEVGAEEEDKKVAAPPQPAAKAQVVGWPPIRSYRKNTMATNQIKSNKEDVDAKQGQGFLYVKVSMDGAPYLRKVDLKTYKNYKDMSLGLEKMFIGFSTGKEGAENQKDGEYVLTYEDKDGDWMLVGDVPWEMFTDSCRRLRIMKGSDAIGLGCSQLRLVPLFVPKL

SEQ ID NO: 577 - DNA, 585 bp, Oryza sativa
atggaggagtgcaagggcggtggcatgtcgccgtcctcctccatggatagcagcacccacccggcgctgtccacgacgtcgtcggcggcgacggcaaggcgggacctcagcaccgatctccggctagggcttagcctctcgacgtcgtcgtcgtcctccctcctgcaggccgccgccgccgccgccgctgctgatgatagcatcccttctactccaaggaacagccaagtgcacgccgattggccgccgatcaagccgttcctcaggagcgccttgcagaaggcgtcggccgctggcggcggcggcgctcgccgacggcgaacgctgttcgtgaaggtgtacatggagggcgtcccgatcggccggaagctcgacctgctcttgctggatgggtatgacagcctcctcatcaagctctgccacatgttcaagacgcccatcacctatgctgatgttatggagtgccatcaacaagttcctggccagaaggctgcccatgtcctcacctatgaagaccaggacggggactggatgatgactcttcctgagcagcgtaaagaagctcaggattgcaaggatggataa

SEQ ID NO: 578 - protein, 194 aa, Oryza sativa
MEECKGGGMSPSSSMDSSTHPALSTTSSAATARRDLSTDLRLGLSLSTSSSSSLLQAAAAAAAADDSIPSTPRNSQVHADWPPIKPFLRSALQKASAAGGGGARRRRTLFVKVYMEGVPIGRKLDLLLLDGYDSLLIKLCHMFKTPITYADVMECHQQVPGQKAAHVLTYEDQDGDWMMTLPEQRKEAQDCKDG

SEQ ID NO: 579 - DNA, 735 bp, Oryza sativa
atgtcgcctcccctcgagccgcacgactacatcggcctctccgctgcggcggcgtccccgacgccgagctcgtcgtcctgctcgtcctcgccgaacccaggcggcgaggcccgcggcccacgcctcacgctccgcctcggcctcccggggtcggagtcccccgagcgggaggtcgtcgccgcggggctcaccctcgggcctctgcccccgaccaccaccaaggcggcctccaagcgcgccttccccgactcctccccgcggcacggcgccagctccggctccgtcgccgccgccgccgcagcttgccaggacaaggcggcccccgccgccgctccgccggctgcaaaggcgcaggtggtgggatggccgcccgtgcggaactaccgaaagaacacgctggcggcgagcgcctccaagggcaaaggggaggacaagggcacggctgaagggggccctctctatgtcaaggtgagcatggatggagccccctacctcaggaaggtcgacctcaagatgtattctagctatgaggacctctccatggctctcgagaagatgttcagctgcttcatcactggtcaaagcggtttgcgtaaatcatcaaacagagataggcttactaatggttcaaaggctgatgccctccaagaccaagagtatgtccttacatatgaagataaggatgctgactggatgcttgttggtgatcttccttgggaatcgaagcaggactag

SEQ ID NO: 580 - protein, 244 aa, Oryza sativa
MSPPLEPHDYIGLSAAAASPTPSSSSCSSSPNPGGEARGPRLTLRLGLPGSESPEREVVAAGLTLGPLPPTTTKAASKRAFPDSSPRHGASSGSVAAAAAACQDKAAPAAAPPAAKAQVVGWPPVRNYRKNTLAASASKGKGEDKGTAEGGPLYVKVSMDGAPYLRKVDLKMYSSYEDLSMALEKMFSCFITGQSGLRKSSNRDRLTNGSKADALQDQEYVLTYEDKDADWMLVGDLPWESKQD

SEQ ID NO: 581 - DNA, 870 bp, Oryza sativa
atggagctggagcttgggctggcgccaccgaattccggtcatctcgtcgtcgacgagctcagcagcagcagcggcggcggcagcggcagcgcgccggtgtctgcctcgtcggccgggaagaggggattcagggaggcgttccaggagacgctgctgctcttcgacgacggcagctgctgcaacaccagcgacgacgattgcaggaggaggaagaagacggtggtggggtggccaccggtgagctcggcgcggcgggcgtgcggcggcgccaactacgtgaaggtgaagaaggaaggcgacgccatcgggaggaaggttgatttggccctccattcctcctacgacgagctcgctgccacgctcgcccgcatgttccccaccaacgaccaccaaggcgagaagaaaatggccaatgatgatcatggcgatgccgctggacctgtggtcacctacgaggatggtgatggggattggatgctgtcgacgacgcggagcctgaatcttctcccggagaacgcccgggtgagctgcagagactacaagaagatgctcgacagcggcaggccgcacctgctggtggacgtgcggccgtcgcaccattttctgatagcgtccatggctcactccatcaacgtcccgctctcgctgctggaggagaagctgccactgctgcgggactcggcgagggaagtgtcgtcgcggcgcgacgggcggcagcactgccctgtgtacgtcatctgccggcgaggcaatgactcccaggtcgccgtgcagatcctccgcgagaatgggttcctgtatgcgagcgacgtcgccggtgggtttgagtcctgggccaaggaagtcgaccccagcttccttctctactag

SEQ ID NO: 582 - protein, 289 aa, Oryza sativa
MELELGLAPPNSGHLVVDELSSSSGGGSGSAPVSASSAGKRGFREAFQETLLLFDDGSCCNTSDDDCRRRKKTVVGWPPVSSARRACGGANYVKVKKEGDAIGRKVDLALHSSYDELAATLARMFPTNDHQGEKKMANDDHGDAAGPVVTYEDGDGDWMLSTTRSLNLLPENARVSCRDYKKMLDSGRPHLLVDVRPSHHFLIASMAHSINVPLSLLEEKLPLLRDSAREVSSRRDGRQHCPVYVICRRGNDSQVAVQILRENGFLYASDVAGGFESWAKEVDPSFLLY

SEQ ID NO: 583 - DNA, 543 bp, Oryza sativa
atggagctggagcttgggctggcgccaccgaattccggtcatctcgtcgtcgacgagctcagcagcagcagcggcggcggcagcggcagcgcgccggtgtctgcctcgtcggccgggaagaggggattcagggaggcgttccaggagacgctgctgctcttcgacgacggcagctgctgcaacaccagcgacgacgattgcaggaggaggaagaagacggtggtggggtggccaccggtgagctcggcgcggcgggcgtgcggcggcgccaactacgtgaaggtgaagaaggaaggcgacgccatcgggaggaaggttgatttggccctccattcctcctacgacgagctcgctgccacgctcgcccgcatgttccccaccaacgaccaccaaggcgagaagaaaatggccaatgatgatcatggcgatgccgctggacctgtggtcacctacgaggatggtgatggggattggatgctggttggggacgtgccatgggatgattttgcacgatctgtgaaacgcctgaagatactgggttaa

SEQ ID NO: 584 - protein, 180 aa, Oryza sativa
MELELGLAPPNSGHLVVDELSSSSGGGSGSAPVSASSAGKRGFREAFQETLLLFDDGSCCNTSDDDCRRRKKTVVGWPPVSSARRACGGANYVKVKKEGDAIGRKVDLALHSSYDELAATLARMFPTNDHQGEKKMANDDHGDAAGPVVTYEDGDGDWMLVGDVPWDDFARSVKRLKILG

SEQ ID NO: 585 - DNA, 807 bp, Oryza sativa
atgagaggaggagcagctgggcccaccgccggcgagccgccggggacggaggcggaggcggaggaagtggaggagagctcagctggggacgacgaggagctggagctcgggctcagccttggctccaagaaacagcagcagcagcagcatgcgccgtgccgaatcctgacggccagggacctgcagccggcggcggcgctgtcaccggactcctccgtgtcgtcgtcatcccccgcggcggcggcggcgggggggaagagggctgagggccccaccgccaccacctcgcctgggacggttgcttccggccatccacacagcagctttggagtggtgggatggccaccgatccgacagttcaggatgaacagcctgttcaatcaggctaaagaaaacacatctgaaaccgacaccaagaagaccgccaccaatgaatctgatgtgcagaaggacaaggaggagggcgaaaagaaaggacgggttgctggatgggtgaaggtgaacatggatggagaggtcattggaaggaaggacaatgagatagttttgcaaattaaaataatagccatgcttcatattgtacctaataatacaaagtcgctgaaactactagacaactctgccgaataccagctcacctacgaggacagggatggtgactggatgctcgttggagatgttccttgggaaatgtttgtcagctctgtgaagaggttgaggatcatgaggacatcagatgcgaatggtcttggtcagcgataccagggaattcacagaaccattgcttcaacaagaggcagatcctga

SEQ ID NO: 586 - protein, 268 aa, Oryza sativa
MRGGAAGPTAGEPPGTEAEAEEVEESSAGDDEELELGLSLGSKKQQQQQHAPCRILTARDLQPAAALSPDSSVSSSSPAAAAAGGKRAEGPTATTSPGTVASGHPHSSFGVVGWPPIRQFRMNSLFNQAKENTSETDTKKTATNESDVQKDKEEGEKKGRVAGWVKVNMDGEVIGRKDNEIVLQIKIIAMLHIVPNNTKSLKLLDNSAEYQLTYEDRDGDWMLVGDVPWEMFVSSVKRLRIMRTSDANGLGQRYQGIHRTIASTRGRS

SEQ ID NO: 587 - DNA, 420 bp, Oryza sativa
atgtcgatcagggcgcaggtggtggggtggccgccggtccggtcgttcaggaagaacgtgctcgccgagaaatgcaaggcggcggcgctggtgaaggtgagcatggacggcgcgccgtacctgaggaagatcgacgtcgccatgtacaagagctacccggagttgtccatggcgttccagaacatgttcacctccttcaccatcggcaagtgtgggtcccatcagcagctgaaggagagcaataagctgagagatgacctggagtacgtgccgacgtacgaggacaaggacggcgactggatgctcgtcggcgacgtcccgtgggagatgttcgtcgagtcgtgcaaacgcctccgaatcatgaaagggtctgaagccattggccttgcaccaagggcagtggagaaatgcaagagctga

SEQ ID NO: 588 - protein, 139 aa, Oryza sativa
MSIRAQVVGWPPVRSFRKNVLAEKCKAAALVKVSMDGAPYLRKIDVAMYKSYPELSMAFQNMFTSFTIGKCGSHQQLKESNKLRDDLEYVPTYEDKDGDWMLVGDVPWEMFVESCKRLRIMKGSEAIGLAPRAVEKCKS

SEQ ID NO: 589 - DNA, 681 bp, Oryza sativa; identical to SEQ ID NO: 523

SEQ ID NO: 590 - protein, 226 aa, Oryza sativa; identical to SEQ ID NO: 524

SEQ ID NO: 591 - DNA, 285 bp, Oryza sativa
atggacggggcgccgtacctgaggaagatcgacctgaggatgtacaagggctacagggagctccgcgaggccctggaggccatgttcgtctgcttctccggcgccgccgacggcgccaacccgtcggagttcgccatcacctaccaggacaaggacggggacctcatgctcgtcggcgacgtccctttcgacatgttcaccagcacatgcaagaagttgaggatcatgaagagatctgaagccacaggggctaggatcaccaaggcaaatgaagatctaatctaa

SEQ ID NO: 592 - protein, 94 aa, Oryza sativa
MDGAPYLRKIDLRMYKGYRELREALEAMFVCFSGAADGANPSEFAITYQDKDGDLMLVGDVPFDMFTSTCKKLRIMKRSEATGARITKANEDLI

SEQ ID NO: 593 - DNA, 711 bp, Oryza sativa; identical to SEQ ID NO: 525

SEQ ID NO: 594 - protein, 236 aa, Oryza sativa; identical to SEQ ID NO: 526

SEQ ID NO: 595 - DNA, 588 bp, Oryza sativa
atggcggcggagagcatcgacgcggagctgcgcctcgggctgcccggcagcggcggcggtgacggcgtggcggcgaagaagcggcggtcggcgtcgtcgacggtgaagagcgaggcctccggcacggcctgctgcggcggcgccggcgcccgggacgtcgaagacggcgcctcgccggcgtccaaagtgcaggtggtggggtggccgccggtggggtcgtacaggaggagcacgttccagtcgtcgtcgtcgtcgacggcggcggcggcgaaggggaagggcggcggcgagacggatcaagggaggaagaataagggaggagggctgtacgtgaaggtgagcatggacggggcgccatacctccgcaaggtcgacctccggatgtacggcggctacagggagctcagggacgctctcgacgcgctcttcggctgcttctccgccgacgcctccgcctccgccgcccacttcgccgtcgcctatgaggacaaggacggcgacctcatgctcgccggcgacgtgccctgggacatgttcatctcttcttgcaagaagctgcggataatgcgaggatctgaggcgagatga

SEQ ID NO: 596 - protein, 195 aa, Oryza sativa
MAAESIDAELRLGLPGSGGGDGVAAKKRRSASSTVKSEASGTACCGGAGARDVEDGASPASKVQVVGWPPVGSYRRSTFQSSSSSTAAAAKGKGGGETDQGRKNKGGGLYVKVSMDGAPYLRKVDLRMYGGYRELRDALDALFGCFSADASASAAHFAVAYEDKDGDLMLAGDVPWDMFISSCKKLRIMRGSEAR

SEQ ID NO: 597 - DNA, 597 bp, Oryza sativa
atgtcggtggagacggagcggagctcgacggagtcgtcggcggcgtccgggctcgacttcgaggacaccgccctcaccctccgcctcccgggctcctcctcctcctcctcctcctcgtcatcctcctcctcctcgtcgccgtcggagcccgaccgcaagcgcgcctccgccaccgacgacgaccccgacaaccgcctcggctccaccgccaccgagtcccccccttcccccaagttgcagcctgacatggcgcgtcgcggcgggcgcagggcgcgggtggtcgggtggccgccggtgcgcgcgttccggaagaacgcgctcgcggcgtcggcggcggcgtcctccagcaaggccaagttcgtgaaggtggccgtcgacggcgcgccgtacctgcgcaaggtggacctcgaggcgtaccggggctacgaccagctgctcgccgccctccaggacaagttcttctcccacttcaccatccgcaagctcgggaacgaggagatgaagctcgtcgacgcggtgagcggcaacgagtacgtgccgacgtacgaggacaaggacggcgactggatgctcgtcggagacgtcccctggaagtga

SEQ ID NO: 598 - protein, 198 aa, Oryza sativa
MSVETERSSTESSAASGLDFEDTALTLRLPGSSSSSSSSSSSSSSSPSEPDRKRASATDDDPDNRLGSTATESPPSPKLQPDMARRGGRRARVVGWPPVRAFRKNALAASAAASSSKAKFVKVAVDGAPYLRKVDLEAYRGYDQLLAALQDKFFSHFTIRKLGNEEMKLVDAVSGNEYVPTYEDKDGDWMLVGDVPWK

SEQ ID NO: 599 - DNA, 1569 bp, Oryza sativa
atggggaaatgttataacaacgcctccaagaacggtaataacgcctcaggtgtcaccatcgtcaagctggcccaatggcctgacaaggctttcgccaacagttccccattcaacaccatgaaaccaacccgtacaacgacgcttgctagaacaccgcaccatcccttcagcaaccaagcccaggccatcaccccatgctcaggcgtgctcacacaagactgctatcccacagtgggtttcccaaccaaaaagccacaaatattaatttcctctcctacccctgccggcaacgcgtctctctgctccctctctcttgtcgccgctctctctgctctctccctctctctcagcaaagcggacggcgagccacgcgggtcgcggcggcggacggccctgccccaccccgctgccggcatcgaagcggcggcatcgacggggcacggggcgagatctgggtgcgcgtcgccacccctctccctttgcccgtcgccaacctccccgccgccgcccgtcgcaccgttgccgtcgccgtggtgtccagatctggtcggccgcgccgtcgccgtcgtgggtggatctgggcgcggatccggggctagatccgcgccgcatcgagacggacgtggcgccggcggagatcagggaggacgacgactcttccacctcgccggtgtcggatccgctctttccccctctcttccccgccgccgctcgtcgccgtccacctcgtcggcgcggcctccagctcctccaccacctcgagctctagccaagggtgttacgggaaatacgggtgtggggaacagtgtccacaagctacgagacagagagagagagatggcttggaatggcaggtttggagaggatggagaggaagagaggagccttgagctcagccttgccctccctggatacttctccagctcaggtttgcaggggaacacgagcactgctgctgatggagccaagggaaacgatgggttcaaggcaagcaaaaagatgctaaaatttgcccctaaattctctgcgattcgcagcaggccggcggctccggtggtcgggtggccgccggtgcggtcgttccggcggaacctcgcctcgtcgtcgtcgtcgtcgaagccgccgcgtggaggccgagacgccgccgccgccgccacgggaggcaaggtggcccggttcgtcaaggtgaacatggacggcgtcccgatcggccggaaggtcgacctggcggcgcacggcggctacggcgagctctccgccgccgtcgaccgtctcttccgcggcctcctcgccgctcaaagggacccaaccatggccaccgccgccgccgccgccgctgccggcgagagctgcacaggagaggaggaggcgatcgccgggctcctcgacggcggcagcggcgagtacacgctcgtctacgaggacgacgagggcgaccagatgctcgtcggcgacgtgccatggaacatgttcatcgccgcggcgaggaggctgcgcgtgctcaggagctccgacctgaacgcctccacgatacgagcagggagcaggaagagggcagctgccgagtga

SEQ ID NO: 600 - protein, 522 aa, Oryza sativa
MGKCYNNASKNGNNASGVTIVKLAQWPDKAFANSSPFNTMKPTRTTTLARTPHHPFSNQAQAITPCSGVLTQDCYPTVGFPTKKPQILISSPTPAGNASLCSLSLVAALSALSLSLSKADGEPRGSRRRTALPHPAAGIEAAASTGHGARSGCASPPLSLCPSPTSPPPPVAPLPSPWCPDLVGRAVAVVGGSGRGSGARSAPHRDGRGAGGDQGGRRLFHLAGVGSALSPSLPRRRSSPSTSSARPPAPPPPRALAKGVTGNTGVGNSVHKLRDREREMAWNGRFGEDGEEERSLELSLALPGYFSSSGLQGNTSTAADGAKGNDGFKASKKMLKFAPKFSAIRSRPAAPVVGWPPVRSFRRNLASSSSSSKPPRGGRDAAAAATGGKVARFVKVNMDGVPIGRKVDLAAHGGYGELSAAVDRLFRGLLAAQRDPTMATAAAAAAAGESCTGEEEAIAGLLDGGSGEYTLVYEDDEGDQMLVGDVPWNMFIAAARRLRVLRSSDLNASTIRAGSRKRAAAE

SEQ ID NO: 601 - DNA, 774 bp, Oryza sativa; identical to SEQ ID NO: 543

SEQ ID NO: 602 - protein, 257 aa, Oryza sativa; identical to SEQ ID NO: 544

SEQ ID NO: 603 - DNA, 879 bp, Oryza sativa
atggaagaagaattcaaggacaaaggcctccctcccacgctgctacacctcatccctgacgggagagaatggaaggtgaaagaagcagatggagaaggatcaaggaacacaaacttagatgccgatgaggataaggagctagagcttaagctcggcctccctggtgtccaacaggaagagagagcagctgattcaagagagaagatacagcagcaacaacgagagagttcctcagaaccatccatcggttgcttccctacacattcaaagcctaccaccagcatcggcacaactggggcaaagagaggattttttgcgactgttggggccacactagaaggttataatcagagccaccgggacacagaagaatgtgggaaggagctaacgttaggagatgaaaatatggcaggtgagaggaagaaaggatgctgtccctcaccaccatgctcagctgcagcgcacagcagcaacccccaggggagaggtgctattcctccagtagtcggttggcctccaatccggtccttcaggagaaacctcacaaatggcagttcatttaaacagtcccctgaacgacaaaatgacgaagctgatgacaaggcaaagccaatctgcaagaagagacctcttgtcaaaatcaacatggatgggatccccattggaaggaaagtagaccttgaaatatacgacagctaccagaagctgtcatctgctgttgaagagttgttccgtggttttcttgaagacaatgatggagacagaatgttagctggggacataccatggaaggtatttgtttcgactgttaagaggttgagggttatgaggaggtcagaacttccccatgacatgattggagctgaccctgtgaagtag

SEQ ID NO: 604 - protein, 292 aa, Oryza sativa
MEEEFKDKGLPPTLLHLIPDGREWKVKEADGEGSRNTNLDADEDKELELKLGLPGVQQEERAADSREKIQQQQRESSSEPSIGCFPTHSKPTTSIGTTGAKRGFFATVGATLEGYNQSHRDTEECGKELTLGDENMAGERKKGCCPSPPCSAAAHSSNPQGRGAIPPVVGWPPIRSFRRNLTNGSSFKQSPERQNDEADDKAKPICKKRPLVKINMDGIPIGRKVDLEIYDSYQKLSSAVEELFRGFLEDNDGDRMLAGDIPWKVFVSTVKRLRVMRRSELPHDMIGADPVK

SEQ ID NO: 605 - DNA, 966 bp, Oryza sativa
atgccgccgccgctcgaagcgcgagactacatcgggctcggggcgaccccggcctcgtcctcctcctcctgctgcgcgtcgacccccgtcgccgaggtcgtcggggcgcacctcgcgctccgcctcggcctcccggggtcggagtcgcccgcccgcgctgaggcggaggctgtcgtcgtcgacgccgcgctcacgctcggccctgctcctcctcccaggggcggcgccaagcgcgggttcgtcgactccctcgaccgatccgagggccgtcgtgctgctgccaccgccggtgatgatgagaggggcgtgagggaggaggaggaggaggaggagaaggggttgggggaagctgctgctggagctccgcgagctgccaaggcacaagttgttggatggccacctgtgcgaagctaccggaagaatacattggccgccagtgccacaaagacaaagggggaagaccaaggcaaaagtgaggtaggatgttgctatgttaaggtcagcatggatggagccccataccttaggaaggttgacctcaagacctattcaagctatgaagatctttcacttgctcttgagaagatgttcagctgctttatcactggtaggagcagttcacataaaacatcaaaaagagacaggctgactgatggttctagggctgatgcccttaaggaccaagagtatgttcttacctatgaagacaaggatgctgactggatgcttgttggtgatcttccttgggacttgtttactactagttgtcggaaactgcggatcatgagaggttcagatgctgctggaattgcctcagataacttgagtaacggtaactcgtatcttctgtgtccctgcagctccgagatcactggaacagacaggtcagaacaaatagttgcccgagctttcatcatctggacagcaaatgtgtggaccaagtttgctgtagcaagtttccgctga

SEQ ID NO: 606 - protein, 321 aa, Oryza sativa
MPPPLEARDYIGLGATPASSSSSCCASTPVAEVVGAHLALRLGLPGSESPARAEAEAVVVDAALTLGPAPPPRGGAKRGFVDSLDRSEGRRAAATAGDDERGVREEEEEEEKGLGEAAAGAPRAAKAQVVGWPPVRSYRKNTLAASATKTKGEDQGKSEVGCCYVKVSMDGAPYLRKVDLKTYSSYEDLSLALEKMFSCFITGRSSSHKTSKRDRLTDGSRADALKDQEYVLTYEDKDADWMLVGDLPWDLFTTSCRKLRIMRGSDAAGIASDNLSNGNSYLLCPCSSEITGTDRSEQIVARAFIIWTANVWTKFAVASFR

SEQ ID NO: 607 - DNA, 591 bp, Oryza sativa
atggcgccgccacaggagcgggactacatcgggctgtcgccggcggcggcggcggcgctggcaacggagctgcgccttgggctgccggggactgcggaggaggctgaggcacaggtggtaggatggccaccaatccgcagctacaggaagaacaccatggcgatgagccagcctgctctgaaaggcaaagacgacggcgaggcgaagcaggctccggcatccggttgcctctatgtcaaggtgagcatggatggtgctccttacctcaggaaggtggacctcaagatgtacaagaactacaaggagctctctttggctctggagaagatgttcagctgctttaccgtcggtcatggtgaatcaaatgggaagtcagggagagatggattatctgattgccgcctgatggatcttaaaaatggaacagaacttgtgctcacttatgaggacaaggatgaagattggatgcttgttggtgatgttccgtggcgaatgttcacagacagctgtaggaggctgaggattatgaaggggtcagatgcagtgggccttgctccaagagccactgacaagagcaaaaatcggacctga

SEQ ID NO: 608 - protein, 196 aa, Oryza sativa
MAPPQERDYIGLSPAAAAALATELRLGLPGTAEEAEAQVVGWPPIRSYRKNTMAMSQPALKGKDDGEAKQAPASGCLYVKVSMDGAPYLRKVDLKMYKNYKELSLALEKMFSCFTVGHGESNGKSGRDGLSDCRLMDLKNGTELVLTYEDKDEDWMLVGDVPWRMFTDSCRRLRIMKGSDAVGLAPRATDKSKNRT

SEQ ID NO: 609 - DNA, 504 bp, Oryza sativa
atgttcagagaaaaccgcgcggcttcatcagctcagctggtgggatggccaccggtgcgcgcattccgcaagaacctgtccaccccaaaacctgcagatgcagatgacctgatgaacaagatgaagccctgctctgatgaaggccatggctccagagatgcagcccaagagaggaggccatcatcaaccatgtttgtgaaggtgaacctggagggctacgctgtcggaaggaagatcgacctgaaggcgcaccgcagctacgactcgctgtcccaggctctgcagagcatgttccatggcttcttgtcagatggcattgcaactagagacaatgagctgcagcggatggaggagggcagcaagaagaggtatgttcttgtgtatgaggataatgagggagaccgcatgctcgtcggcgacgtcccatgggagtacctgttcattgcttcagtgaagaggctctacattgctcaggatcctagagttcatgggaagctacgataa

SEQ ID NO: 610 - protein, 167 aa, Oryza sativa
MFRENRAASSAQLVGWPPVRAFRKNLSTPKPADADDLMNKMKPCSDEGHGSRDAAQERRPSSTMFVKVNLEGYAVGRKIDLKAHRSYDSLSQALQSMFHGFLSDGIATRDNELQRMEEGSKKRYVLVYEDNEGDRMLVGDVPWEYLFIASVKRLYIAQDPRVHGKLR

SEQ ID NO: 611 - DNA, 585 bp, Oryza sativa
atgtcgacgagctccggcgccgactcgtccccgcccgtctcgggcctcgactacgacgacaccgccctaaccctcgccctccccggctcctcctcctcctcctcctcctccaccgccgaccccgaacgcaagcgcgccgcccacgccgaccacgccgacgccaagccgccttccccaaaggcgcgggcggtggggtggccgccggtgagggcgtacaggcggaacgcgctgcgggaggacgccgcgagggcgaagctggtcaaggtggccgtggacggcgcgccgtacctgcgcaaggtggacctcgcggcgcacgccggctacgcgcccctcctccgcgcgctccacggcatgttcgcctcctgcctcgccgtccgcggcggcgccggcggcgacggcgagggtacaaagctcgtcgacttggtcaccggcgccgagtacgtgcccacctacgaggacaaggacggcgactggatgctcgtcggcgacgtcccctggaagatgttcgtcgagtcctgcaagcggatccgtctcatgaagagctccgaggccgtcaacttatcgccaagacgatcatccagataa

SEQ ID NO: 612 - protein, 194 aa, Oryza sativa
MSTSSGADSSPPVSGLDYDDTALTLALPGSSSSSSSSTADPERKRAAHADHADAKPPSPKARAVGWPPVRAYRRNALREDAARAKLVKVAVDGAPYLRKVDLAAHAGYAPLLRALHGMFASCLAVRGGAGGDGEGTKLVDLVTGAEYVPTYEDKDGDWMLVGDVPWKMFVESCKRIRLMKSSEAVNLSPRRSSR

SEQ ID NO: 613 - DNA, 822 bp, Oryza sativa
atggcgtcttcttcttctctcaggagcaccagctgcctcgcctccgccgcggagaccgacgccgacaacctctgcctccgcctcggcccgccgggaagcagcatcaccaccaccaccaccatcggcggcgccgacccggcggcgaagaggtccctcggggcgaagcggtcgctggagagcacggacagcatggcctccggcaccggaaattccgccgccggcgacgagcacgacgacgacaccgccgcaccggccaaggcacaggtggtaggatggccaccagtgagggcataccggaggaacaccttccatcaggtcgctgccgccgcaaccaagaagggtggtgatgagaaacagaagcagcagcagcagggaggagggctgtatgtgaaggtgagcatggatggggcaccatacctgaggaaggttgatctcaagatgtgcaagggctacagggagctgagggaggcactggatctcctcttcaccaagtgcttctctgcaaccgcctctgacggatgcagcgatggccagttcgccattgcctacgaggacaaggacggtgacctcatgcttgttggagatgtgccctgggaaatgttcatctcttcctgcaagaagttgaggatcatgaagggctctgaagccagcaagatttatgccttgaagaccaatcaagtgcttaacctgcaggccattggttcaaactctgaagaagataaggcccttgcctggctgcctgcccacactgccaaccaagcagatgcagatgcacggatgaatcagcacaaactccgtggaagaattacctcgaaaaaataa

SEQ ID NO: 614 - protein, 273 aa, Oryza sativa
MASSSSLRSTSCLASAAETDADNLCLRLGPPGSSITTTTTIGGADPAAKRSLGAKRSLESTDSMASGTGNSAAGDEHDDDTAAPAKAQVVGWPPVRAYRRNTFHQVAAAATKKGGDEKQKQQQQGGGLYVKVSMDGAPYLRKVDLKMCKGYRELREALDLLFTKCFSATASDGCSDGQFAIAYEDKDGDLMLVGDVPWEMFISSCKKLRIMKGSEASKIYALKTNQVLNLQAIGSNSEEDKALAWLPAHTANQADADARMNQHKLRGRITSKK

SEQ ID NO: 615 - DNA, 612 bp, Oryza sativa
atgggtcatgaacacgcgccccttgaatgtcgtctgcaaataaaaccagagcaacttgaggacactgaatggcatcagaacgagcactcactgttaaagaagaaaacagtgaaaacattaccttttccaagaagtagggcagagaagcggcatggtccaagtgaaagctgcaaatttgaagggcgaagttacacagaagggaggaacacgacggttagcatggatgctgcaccatatctgaggaaggtggacctcaaaacttacaagaattacaaggacatgtctttgggtctcgagaaaatgttcattggcttcagcaccggagaggccgacgaggaaccccacgtgccgacggaggccgaggacgagaggcgcgccggcggctgcgagctgagcctccttgcggcagagaccgagtatgacgcgcgcgtcgatggacgccggcccgtcaagctcacgagctgggcctcagcgccggacttgtgcaagaagatggcgaaggtcggggagcagcagccggcgctggacttgcgcgagaagatggcgagcgcggtggccggactcgtcgtcttggaacgacacccacaaaatatatggcgagtctgcatgtag

SEQ ID NO: 616 - protein, 203 aa, Oryza sativa
MGHEHAPLECRLQIKPEQLEDTEWHQNEHSLLKKKTVKTLPFPRSRAEKRHGPSESCKFEGRSYTEGRNTTVSMDAAPYLRKVDLKTYKNYKDMSLGLEKMFIGFSTGEADEEPHVPTEAEDERRAGGCELSLLAAETEYDARVDGRRPVKLTSWASAPDLCKKMAKVGEQQPALDLREKMASAVAGLVVLERHPQNIWRVCM

SEQ ID NO: 617 - DNA, 741 bp, Oryza sativa
atgaagagctcttcagttgcaccaaggctgaaacaggagagacaagatgactgtaagtttcaggaaggtgatgtgaacagccttgagcttcggcttggcatatcttccgacaatggccagatcagtggtggtggtgctgctagtccatggcttggtgtgggagtgcacccttggagcctggctgcaaggcaagggaaggcagccttggagcaagctcaccagaggcctaatgaatgtgctgtccaaagagaaaaccgcgcggcttcatcagctcagctggtgggatggccaccggtgcgcgcattccgcaagaacctgtccaccccaaaacctgcagatgcagatgacctgatgaacaaggtgaagctctgctctgatgagggccatggctccagatgtgcagcccaagagaggaggtcatcatcaaccatgtttgtgaaggtgaacctggagggctatgctgtcggaaggaagatcgacctgaaggcgcaccgcagctatgactctctgtcccaggctctgcagagcatgttccatggcttcttgtcagatggcattgcaactagagacaatgagctgcagcagatggaggagggcagcaagaagaggtatgttcttgtgtatgaggataatgagggagaccgcatgctcgtcggcgacgtcccatgggagctgttcattgcttcagtgaagaggctctacattgctcaggatcctagagttcatgcgaagctacgataa

SEQ ID NO: 618 - protein, 246 aa, Oryza sativa
MKSSSVAPRLKQERQDDCKFQEGDVNSLELRLGISSDNGQISGGGAASPWLGVGVHPWSLAARQGKAALEQAHQRPNECAVQRENRAASSAQLVGWPPVRAFRKNLSTPKPADADDLMNKVKLCSDEGHGSRCAAQERRSSSTMFVKVNLEGYAVGRKIDLKAHRSYDSLSQALQSMFHGFLSDGIATRDNELQQMEEGSKKRYVLVYEDNEGDRMLVGDVPWELFIASVKRLYIAQDPRVHAKLR

SEQ ID NO: 619 - DNA, 423 bp, Oryza sativa; identical to SEQ ID NO: 565

SEQ ID NO: 620 - protein, 140 aa, Oryza sativa; identical to SEQ ID NO: 566

SEQ ID NO: 621 - DNA, 435 bp, Oryza sativa
atgttcgccgccgacgaaaccacggcgcccccgccaaggagcgcggcggcggcggcgaccgaggccagcaggacattgaacatgtttgccaaggtgcacatggatgggtacaaggtgggcaggaagatcaacctcagggcacaccgcaactacgactccctccgtcgggtcctcaccaagatgactcataatttcttctgccccacagattattcaagcacaaataagggagaagaagattgtgctaaaagtgacgagttcatatttctatatgaagattttgagggtgaccgaatgcttgttggcgatgtcccatgggagttgttccttgcatcagcaaaaaggttgtacattgccaaaaacccagcacccagaaacaaagaacatgctgaaatcgccaaaaggaaagaaactgaagatgcaatagataactga

SEQ ID NO: 622 - protein, 144 aa, Oryza sativa
MFAADETTAPPPRSAAAAATEASRTLNMFAKVHMDGYKVGRKINLRAHRNYDSLRRVLTKMTHNFFCPTDYSSTNKGEEDCAKSDEFIFLYEDFEGDRMLVGDVPWELFLASAKRLYIAKNPAPRNKEHAEIAKRKETEDAIDN

SEQ ID NO: 623 - DNA, 834 bp, Oryza sativa; identical to SEQ ID NO: 569

SEQ ID NO: 624 - protein, 277 aa, Oryza sativa; identical to SEQ ID NO: 570

SEQ ID NO: 625 - DNA, 594 bp, Oryza sativa; identical to SEQ ID NO: 571

SEQ ID NO: 626 - protein, 197 aa, Oryza sativa; identical to SEQ ID NO: 572

SEQ ID NO: 627 - DNA, 255 bp, Zea mays
  misc_feature (17)..(17): n is a, c, g, or t
aaagcagggctggtacncggtccggaattcccgggatctccactccaaacaaacaagggacggtgagcgaggaaccccaccccacgtcgccctccccccacctttctctctagtctctagtttctagtctctacccccaggccccagactcctgcctcttctctctctcgcccacccgccccggccccaatgtcgccgcccctcgagccccacgactacatcggcctctccgccgccgccgccgcggcgccgccg

SEQ ID NO: 628 - protein, 120 aa, Zea mays
MYVKVSMDGAPYLRKVDIKMYSSYEDLSVALQKMFSCFIAGQSGLHKSSSKDRLTNGSKVDALKDQEYVLTYEDKDADWMLVGDLPWDYFTSICRKLKIMRGSDAVGIAPRTIEQTGQNK

SEQ ID NO: 629 - DNA, 840 bp, Zea mays
gacatcaggaaccatcagttctttgtggcacgatggatgatttcatagtagaataacagggaatactggaaaaagcaagcatacacaggaagcagagagctccctgatttggcctttgaagggcacaagaacagatctgacggatcacatcacagacatacaaatacacacgtctcaagaacacgtggaaactacactaacatttgacgacttttgataattccgagcaactatttaagccttcaacatggccttccagctagctcagatttcttgcgtgggtgcaggcaaagaccaagcttatttgttctgacctgtctgctctatggttcttggagctattccaacagcatcagagcccctcatgattttgagcttccggcagatagaggtaaaataacgaattgtatatgaaacttatacggggtaatcagtttaccgaattatataacaaatgcgtttagtacctgcgccacaagtacattttttttcttttcatccttctgttatttgcatgtcaccatagtcccagggaagatcaccgacaagcatccagtctgcatccttatcctcatatgtaagtacatactcctggtctttgagggcatccaccttcgagccattagtcagcctgtctttgctcgatgatttatgcaggccactttgaccagcgatgaagcagctgaacatcttctggagcgccacggagaggtcctcgtagctggagtacatcttgatgtccaccttcctgaggtagggcgcgccatccatgctcaccttcacgtacatgggccgggccgcagacgcggcgtcctccgccgccggcgccttgctcctgga

SEQ ID NO: 630 - protein, 97 aa, Zea mays
MYVKVSMDGAPYLRKVDIKMYSSYEDLSVALQKMFSCFIAGQSGLHKSSSKDRLTNGSKVDALKDQEYVLTYEDKDADWMLVGDLPWDYGDMQITEG

SEQ ID NO: 631 - DNA, 255 bp, Zea mays
ctcctccccctccggttcgggttcgggttcgtgaggttctccggggttcgggttcgtgggtgagcggatcgagatggcggcgtcggatgttgagtaccgctgcttcgtcggcggcctcgcctgggccacggacgaccactccctccacaacgccttcagcacctacggcgaggtcctcgagtccaagatcatcctcgatcgggagacgcagaggtcccgcggcttcggcttcgtcaccttctccacggaggaggc

SEQ ID NO: 632 - protein, 120 aa, Zea mays
MYVKVSMDGAPYLRKVDIKMYSSYEDLSLALEKMFSCFIAGQSGLHKSSSKDRLTNGSKVDALKDQEYVLTYEDKDADWMLVGDLPWDYFTSICRKLKIMRGSDAVGIAPRTVEQTGQNK

SEQ ID NO: 633 - DNA, 255 bp, Zea mays
gatgaccacacattagcaagcttcattggacatttatatagagggacaacagacagtccatgggacactgtttttttgcaaactaggtagaggggtgctcaatcgtagtcgcagcactcattgtaccaaaccatttacacgtcgtacgaaggcttagcaacaatcaaatagcggggggttttttttttgtccgtagacgatgttgtaaaactaacattgacagacgtggagttctttacttgcgtagcagcaaaa

SEQ ID NO: 634 - protein, 244 aa, Zea mays
MSPPLDLDYIGLSPAAAAAAAHDDLKGTELRLGLPGSGSPDRRVVAATATTLDLLPAKGAKRGFSDEAPTPSPGAASGKGKKVAEEEDDKKVAATPQPVAKAQVVGWPPIRSYRKNTMSTTQLKGSKEDAEAKQDQGFLYVKVSMDGAPYLRKIDLKTYKNYKDLSTALEKMFSGFSTGKDGLSEYRKDGEYVLTYEDKDGDWMLVGDVPWEMFADSCRRLRIMKGSDAIGLAPRAADKSKNRN

SEQ ID NO: 635 - DNA, 580 bp, Zea mays
  misc_feature (7)..(34): n is a, c, g, or t
ttttttnnnnnnnnnnnnnnnnnnnnnnnnnnnntttttacagcaccttcgatcgctcatacaaaacacagttttgaaaacaaactgctagctaagattttatatacacgcttcatacatctttctcccttttgggttcagaaagaaacatgccttttttttttttggagagctcaagccacacagctcctccctcgctccttcctcgtcacgtaggatccgtgtgtgctcttggatccgcgttcccaggtggcgtgtctgtagcctctgtttatgtatggatcagcgatcacctggcctcagagcccttcattatcctgagcttcttgcaagaagagatgaacatatcccagggcacgtctccgacgagcatgaggtcgccgtccttgtcctcgtaggcgatggcgtgctggtggtcgccgccgccgtctgccgccgcggagaaggagttggcgaagagcgcgtccagagccttcctgagctccctgtaccccttgtacatccggaggtccaccttcctgaggtacggcgcgccgtccatgctcaccttcacgtacaggcctccctgctgctgcttctg

SEQ ID NO: 636 - protein, 83 aa, Zea mays
MDGAPYLRKVDLRMYKGYRELRKALDALFANSFSAAADGGGDHQHAIAYEDKDGDLMLVGDVPWDMFISSCKKLRIMKGSEAR

SEQ ID NO: 637 - DNA, 255 bp, Zea mays
aactcaaataaactaaagttatactaatggattcccccatcacctggcacatggcctgttccacccacttgaccacatacaggtaccataataataaataataatagtcccattgatgccctttacttaacaatcacataaacttgattaacaacactggaataaaatcaccaagtagattctgggagacacggtaggggacatgacataacaccaatccagctacacacggatatattattgcttctggtccat

SEQ ID NO: 638 - protein, 227 aa, Zea mays
MAGADVDVGTELRLGLPGGGAAAAKKDTIDLKLKLPTAGMEEAAAAARPEPAAEKAKRPAEAPAADAEKPPAPKAQAVGWPPVRSYRRNAMTVVQAVRSKKEEEPEKQQQPAAANAFVKVSMDGAPYLRKVDLKTYGSYKDLSAALKKMFGTFTASGNSMNEGRLVDPAGDADDVVTTYEDKDGDWMLVGDVPWEMFVDSCKRLRIMKSSEAIGLAPRTKDKCKNKS

SEQ ID NO: 639 - DNA, 671 bp, Zea mays
ccaccggacagcatggacattttctttacccccttccaggaaatgaagcgctacaaacttccaaacacagatgaaagtatcaaacagcaagcagtacgctatctttcccaaaaaaaaagcgacagcacgggacgaccagctcgggggcaaaaggggcgtccaaaacagcaggacgcaaatcccactgcacaagtgaaaaaaggcctgaccaaggcagcgtccctctcccttcagttcagcgccaggaaagaaagctgccccccctcatttgttccaaactgtctgttccgggggtcttggaggagccatgccagcagcatcaaagcctctcatgatcctaagtttccggcaaaagggggggaacaagtcccagggcaaatcaccaacgagcatccagtcagcatctttatcttcgaaagaaaggacatattcttggtcctgaagggcatcaaccctaaaaccatcagtaagcctatcccttcttgaagtcttgcatgaactgttttgaccagggatgaagcaactgaacattttctccaaaccaagcgaaaaatcctcatagcttgaataggtcttgaggtccaccttccttaggtatggggctccatccatgctgaccttgacataaaagcatcccgcctcactcctaccttcatctcccccatttgtct

SEQ ID NO: 640 - protein, 115 aa, Zea mays
MDGAPYLRKVDLKTYSSYEDFSLGLEKMFSCFIPGQNSSCKTSRRDRLTDGFRVDALQDQEYVLSFEDKDADWMLVGDLPWDLFPPFCRKLRIMRGFDAAGMAPPRPPEQTVWNK

SEQ ID NO: 641 - DNA, 255 bp, Zea mays
ctccccccctaccggctaccctacccatcacacacaaacagccactcctcacctcccccgtcctccggttcatgtcctgctgctccccatgtcgcccccactcgacctcgactacataggcctctcgccggcggcggctgccgccgctgcccacgacgacctgaagggtaccgagctccgccttggtctgccggggtccggttcgccggaccgccgtgttgtggctgccaccgcaaccaccctggacctgctccc

SEQ ID NO: 642 - protein, 212 aa, Zea mays
MSPPLDLDYIGLSPAAAAAAAHDDLKGTELRLGLPGSGSPDRRVVAATATTLDLLPAKGAKRGFSDEAPTPSPGAASGKGKKVAEEEDDKKVAATPQPVAKAQVVGWPPIRSYRKNTMSTTQLKGSKEDAEAKQDQGFLYVKVSMDGAPYLRKIDLKTYKNYKDLSTALEKMFSGFSTGEMSRVTLLSRMARQYVIVFHFDVDGVRSTSRSL

SEQ ID NO: 643 - DNA, 872 bp, Zea mays
  misc_feature (15)..(15): n is a, c, g, or t
  misc_feature (783)..(783): n is a, c, g, or t
agcagtttggtccgnattcccggccgaccccgcgtccgccgtccttcggttcatgtcctgctgctccccatgtcgcccccactcgacctcgactacataggcctctcgccggcggcggctgccgccgctgcccacgacgacctgaagggtaccgagctccgccttggtctgccggggtccggttcgccggaccgccgtgttgtggctgccaccgcaaccaccctggacctgctcccggctaagggcgccaagcgcgggttttctgacgaggcgccgacgccatcgcccggtgcagcttccgggaagggaaagaaggtagcggaagaggaggacgacaagaaggttgcagcgacgccgcagccggtcgcaaaagctcaggtggtgggatggccaccaatccgaagctaccgcaagaacacgatgtctaccacccagctgaagggcagcaaggaggatgctgaggccaagcaggaccaggggttcctgtacgtcaaggtcagcatggatggcgcgccgtacctcaggaagattgacctcaagacttacaagaactacaaggacctgtcgactgcgcttgagaagatgttcagtggcttcagtactggcaaggatggcttatctgagtaccgcaaggatggtgaatatgttctgacttacgaggacaaggatggagattggatgcttgttggcgatgtaccatgggagatgttcgctgactcttgccgccagctcaggatcatgaaaagatcagatgcaattggacttgctccaaggcagctgatnagtccaagaatcgcaactagaatggttgcttcttacgtccagagcagagggagaatccagtgactgtaggggatcttgtggaagcggaa

SEQ ID NO: 644 - protein, 258 aa, Zea mays
  misc_feature (238)..(238): Xaa can be any naturally occurring amino acid
MSPPLDLDYIGLSPAAAAAAAHDDLKGTELRLGLPGSGSPDRRVVAATATTLDLLPAKGAKRGFSDEAPTPSPGAASGKGKKVAEEEDDKKVAATPQPVAKAQVVGWPPIRSYRKNTMSTTQLKGSKEDAEAKQDQGFLYVKVSMDGAPYLRKIDLKTYKNYKDLSTALEKMFSGFSTGKDGLSEYRKDGEYVLTYEDKDGDWMLVGDVPWEMFADSCRQLRIMKRSDAIGLAPRQLXSPRIATRMVASYVQSRGRIQ

SEQ ID NO: 645 - DNA, 687 bp, Zea mays
ccacacattaacaagcttcattggacatttatataaagggacaacaaacagtccatgggacactgtttttttgcaaactaaggaaaggggggctcaatcctaatcccaacactcattgtaccaaaccatttacacgtcgtacgaaggcttaacaacaatcaaaaagcggggggttttttttttgtccgaaaacgaagttgtaaaactaacattgacaaacgtggagttctttacttgcgtaacaacaaaaacatgtggaacaaaccaaaaggcaaaattcttcttgaaactgttaaacgttttccggcttccacaaaaatccctacagtcactggatatctccctcttgctctggactggaaaaaacaaccattctagttgcgattcttggacttatcacctgcccttggagcaagtccaattgcatctgatcctttcatgatcctgagcctgcggaaaaaatcagcgaacatctcccatggtacatcgccaacaaacatccaatctccatccttgtcctcgaaagtcaaaaaatattcaccatccttgcggtactcaaaaaaaccatccttgccagtactgaagccactgaacatcttctcaagcgcagtcgaaaggtccttgtagttcttgtaagtcttgaggtcaatcttcctgaggtacggcgcgccatccatgctgaccttg

SEQ ID NO: 646 - protein, 100 aa, Zea mays
MDGAPYLRKIDLKTYKNYKDLSTALEKMFSGFSTGKDGFFEYRKDGEYFLTFEDKDGDWMFVGDVPWEMFADFFRRLRIMKGSDAIGLAPRAGDKSKNRN

SEQ ID NO: 647 - DNA, 255 bp, Zea mays
ttgtacaaaaaagcaggctggtaccggtccggaattcccgggatccaccacctcctactccgctgcaaccccaaatctctccttcctcgcatacgcgcgcagcagaggagctgagaccaacgaagaagaagaacaaccgagcaagcacaagcttagctagcgtggaggtgcccaaggcgacgacggccgccgcgccaggctagccaaccagctgctcatcgctcctagctgcggagccgatggctggagccgacg

SEQ ID NO: 648 - protein, 237 aa, Zea mays
MAGADVDVGTELRLGLPGGGADAAKAAKRGFEDTIDLKLKLPTAGMEEAAAAAAAKPEPAAEKAKRPAEAPAADAEKPPAPKAQAVGWPPVRSYRRNVMTVQSVKSKKEEEPEKQQSAANAGGNGSAFVKVSMDGAPYLRKVDLKMYNSYTELSVALKKMFSTFTTSGNNMNEGKLVDPVSGADVVTTYEDKDGDWMLVGDVPWEMFVESCRRLRIMKSSEAIGLAPRTKDKCKNRS

SEQ ID NO: 649 - DNA, 720 bp, Zea mays
ccaatccacctacacacaaataaattattgcttctggtccatgaacaaattgaacaaaacaggtctccctccaactaataattaaaacgcattatatttctaaaaaaaccgcagcacactgcaagggcaccatttttttgacacaacgggcagcgtctttaacgctgtatcttcttcagctcctgttcttgcacttgtccttcgttcttggggcaaaacctatggcttcaaaactcttcatgatcctcaaacgcctgcatgactcgacaaacatctcccacgggacgtccccaacgaacatccagtccccatccttgtcttcgtaagtaatgaccacatcagcaccgctgaccggatcaactatttttccctcattcatgttgttcccggatgtggggaaggtgctgaacatcttcttcaaaacaacggaaagctccgtgtagctgttgtacatcttcaggtccaccttgcgcaggtagggcgcgccgtccatgctgaccttcacaaaggcggaaccgttgcccccggcgttggcagcggactgctgcttctcaggctcctcttccttcttgctcttcacagactggacggtcatgacgttcctgcggtatgaccggactggtggccaacccacagcttgtgccttgggtgcgggtggcttctcggcatcagcggccggcgcctcggcgggcctcttggccttctcgggggccggctccg

SEQ ID NO: 650 - protein, 139 aa, Zea mays
MTVQSVKSKKEEEPEKQQSAANAGGNGSAFVKVSMDGAPYLRKVDLKMYNSYTELSVVLKKMFSTFPTSGNNMNEGKIVDPVSGADVVITYEDKDGDWMFVGDVPWEMFVESCRRLRIMKSFEAIGFAPRTKDKCKNRS

SEQ ID NO: 651 - DNA, 753 bp, Zea mays
cagtttgcaacttccgcaagaacacgaggactaccacccagctggagggcagcaaggaggatggtgatgccaagcagggtcaggggttcctgtacgtcaaggtcagcatggatggcgcgccgtacctcaggaagatcgacctcaagacttacaagaactacaaggacctgtcgaccgcgcttgagaagatgttcagtggcttcagtactggcaaggacggctcatctgagtaccgcaaggatggtgaatatgttctgacttacgaggacaaggatggagattggatgcttgtcggcgacgtaccatgggactgccacatcgtctttcgctccaattgtaggatgttcgccggctcctgccgcaggctcaggatcatgaaaggctcagatgcgattggactcgctccaagggcagccgataagtccaagaaccgcaactagaacggtggcttcctatccttacacagtccggtacgagggaggagatgcagtgacttgtaaggatctgtacgaaaaccgaaaaagtctactaacagctatgacttgtgagaagaattctggcttatggtctgcactagaatggcttggtacatcgtctatggacaaaacacgctattcgattaattgttgttaattaagccttggggggggtacgagtgctattcatgtaaatggtttggtgcatcgtgtgctgctgctgcctgctgctgttactacgattgagctcccctataatactatgatttgaagagag

SEQ ID NO: 652 - protein, 110 aa, Zea mays
MDGAPYLRKIDLKTYKNYKDLSTALEKMFSGFSTGKDGSSEYRKDGEYVLTYEDKDGDWMLVGDVPWDCHIVFRSNCRMFAGSCRRLRIMKGSDAIGLAPRAADKSKNRN

SEQ ID NO: 653 - DNA, 255 bp, Zea mays
catatgacatccccctctctcttcaaatcatagtattataggggagctcaatcgtagtaacagcagcaggcagcagcagcacacgatgcaccaaaccatttacatgaatagcactcgtaccccccccaaggcttaattaacaacaattaatcgaatagcgtgttttgtccatagacgatgtaccaagccattctagtgcagaccataagccagaattcttctcacaagtcatagctgttagtagactttttcggt

SEQ ID NO: 654 - protein, 246 aa, Zea mays
MSPPLELDYIGLSPPAAAAAAENDELKGTELRLGLPGSGSPDRRVVAATATTLDLLPAKGAKRGFSDEAPPPSPVATAGKGKKVAEEEYDEKKVAATPQPAAKAQVVGWPPVCNYRKNTMTTTQLEGSKEDGDAKQGQGFLYVKVSMDGAPYLRKIDLKTYKNYKDLSTALEKMFSGFSTGKDGSSEYRKDGEYVLTYEDKDGDWMLVGDVPWEMFAGSCRRLRIMKGSDAIGLAPRAADKSKNRN

SEQ ID NO: 655 - DNA, 567 bp, Zea mays
cttcaaatcatagtattataggggagctcaatcgtagtagcaggcagcagcagtacacgatgcaccaaaccatttacatgaatagcactcgtaccccccaaggcttaaaacaacaattaatcgaatagcgtgttttgtccatagacgatgtaccaagccattctagtgcagaccataagccagaattcttctcacaagtcatagctgttagtagactttttcggttttcgtacagatccctacaagtcactgcatctcctccctcttgcgtgctccggactgaccgttctagttgcggttcttggatttatcggctgcccttggagcgagtccaatcgcatctgagcctttcatgatcctgagcctgcggcaggagcgggcgaacatctcccatggtacgtcgccgacaagcatccaatctccatccttgtcctcgtaagtcagaacatattcaccatccttgcggtactcagatgagccgtccttgccagtactgaagccactgaacatcttctcaagcgcggtcgacaggtccttgtagttcttgtaagtcttgaccaacacaat

SEQ ID NO: 656 - protein, 73 aa, Zea mays
MFSGFSTGKDGSSEYRKDGEYVLTYEDKDGDWMLVGDVPWEMFARSCRRLRIMKGSDAIGLAPRAADKSKNRN

SEQ ID NO: 657 - DNA, 619 bp, Zea mays
atgcaccaaaccatttacatgaatagcactcgtacccccccaaggcttaattaacaacaattaatcgaatagcgtgttttgtccatagacgatgtaccaagccattctagtgcagaccaataccataagccagaattcctctcacaagtcatagctgttagtagactttttcggttttcgtacagatccctacaagtcactgcatctcctccctcgtaccggactgtgtaaggataggaagccaccgttctagttgcggttcttggacttatcggctgcccttggagcgagtccaatcgcatctgagcctttcatgatcctgagcctgcggcaggagccggcgaacatctcccatggtacgtcgccgacaagcatccaatctccatccttgtcctcgtaagtcagaacatattcaccatccttgcggtactcagatgagccgtccttgccagtactgaagccattgaacatcttctcaagcgcggtcgacaggtccttgtagttcttgtaagtcttgaggtcgatcttcctgaggtacggcgcgccatccatgctgaccttgacgtacaggaacccctgaccctgcttggcatcaccatcctccttgctgcccccgcgt

SEQ ID NO: 658 - protein, 100 aa, Zea mays
MDGAPYLRKIDLKTYKNYKDLSTALEKMFNGFSTGKDGSSEYRKDGEYVLTYEDKDGDWMLVGDVPWEMFAGSCRRLRIMKGSDAIGLAPRAADKSKNRN

SEQ ID NO: 659 - DNA, 255 bp, Zea mays
ctggaacacatattgcgccagagcatctgataccaagacaggattaaaatgcaggagaggaaatagcagctacggaggatgctaaatgtcgcaagcaacatgaccgacgatatacatatgccactaccaaaacagctgtgtacataagccctagtatatattactagagaggtgagagggggcggcccgcgccgacggccaggtgagacggcagcagtcagtgtaacagtctacagaaccgaagtagccggcaac

SEQ ID NO: 660 - protein, 230 aa, Zea mays
MRETRTESYSASINKAPTEKKQESTTSGCRLFGIEIGSSAVSPVVTVASVGHDPPPPALSVDAESDQLSQPSHANKATDAPAASSDRSPNETESRQARSCTKVIMQGVAVGRAVDLTRLDGYDDLRRKLEEMFDIPGELSASLKKWKVIYTDDEDDMMLVGDDPWSEFCRMVKRIYIYSYEEAKSLTPKAKLPAIGGDTGVKPDPSKLPPESDVPQSDSDNSAPVAADKD

SEQ ID NO: 661 - DNA, 255 bp, Zea mays
tagaacaagtttagtacaaaaaagcaggctggtaccggtccggaattcccgggatgctcatcacatccatctcattctactactgcctcagagaccaagctgctgcaaccggagaaggagatctattctacaaagtgaagtacttagcttgggacatggaaaccgtcgtgggagacctcatggcgaccgagctgaggcttggcctgccgggcaccgtggacgactgcagccagcaccagcagcagacccagctga

SEQ ID NO: 662 - protein, 258 aa, Zea mays
MLITSISFYYCLRDQAAATGEGDLFYKVKYLAWDMETVVGDLMATELRLGLPGTVDDCSQHQQQTQLKVAAPPSNPTRGKKRPAAEEEEANKRDAEAAPPAAKAPVVGWPPVRSYRKSCFQQAKQQAVSSSSKAADKEDAAAPAPSCTASAAASNATASAGAGSFVKVSMDGAPYLRKLDLRMYKGYRELREALEAMFVSSGSANNNNNLSEFAVTYQDKDGDLMLVGDVPFEMFASTCRKLRIMKRSEATGLGSARQ

SEQ ID NO: 663 - DNA, 255 bp, Zea mays
ccccatccaacacccgggtgggtggttggcgttgcattgcagaccacagcaattagcaaagacatactgtgcggcaacatggaattcagatatgaacacagatatgaaacagcagagcagatacttctgccatatcaaacacaaggataaaaaccaacactttgggcgaccattcctcacaggtaaacagcgtggacagaagagctgggggcgatgatgctcgtatagcccataagaaaagctcaacgagggcac

SEQ ID NO: 664 - protein, 158 aa, Zea mays
MNSLFNQAKENASEAGAKKPIVEPDMQEDKEESKKGRTVGWVKVNMEGDIIGRKVDLNAHRSYKTLASALELMFMKPSIGLCTSSSSKTLKLLDSSSEYQLTYEDRDGDWMLVGDVPWEMFVGSVKRLKIMRTSDAKGLGPRFQGSHRPTAACTRGRT

SEQ ID NO: 665 - DNA, 255 bp, Zea mays
aaagctagggtaacgcgtaagcttagggcccctcgagggatactctagagcggccgccctttttttttttttttttttttttttttttttttgaaaacaacaaggaagagaggtgatcatattacaatacaacttttttttaacaccttgcaacagttatttgttccactgacacaccatggtaattataatcaaacagcttatgatgcaaaaggccctttgatcaggagcagggtgcctttgcatcttgtgcca

SEQ ID NO: 666 - protein, 273 aa, Zea mays
MATTTDLGFEATELRLGLPGGGGGGEPALGGEGRSSSSASGKRGFAETIDLKLKLEPAAVVEAEEEEEDHGVAVALEKEEEAGKMKRSPSQSSVAAAAVLADPAEKPRAAKAQVVGWPPVRSFRKNIMSVQSDKGAGKDAAAANGDKSSAAAGGGAAFVKVSLDGAPYLRKVDLKMYRSYQQLSKALENMFSSFTIGSCGSQGMNGMNESKLVDLLNGSEYVPTYEDKDGDWMLVGDVPWEMFVESCKRLRIMKGSEAIGLAPRAMEKCKNRS

SEQ ID NO: 667 - DNA, 56 bp, Artificial sequence
  primer: prm09131
ggggacaagtttgtacaaaaaagcaggcttaaacaatggaagaagaaaagagattg

SEQ ID NO: 668 - DNA, 49 bp, Artificial sequence
  primer: prm09132
ggggaccactttgtacaagaaagctgggtaacctctctctattccttgc

SEQ ID NO: 669 - DNA, 2194 bp, Oryza sativa; identical to SEQ ID NO: 218

SEQ ID NO: 670 - protein, 6 aa, Artificial sequence
  IAA2 motif
  VARIANT (1)..(1): / replace = "Asn"
  VARIANT (2)..(2): / replace = "Met"
  VARIANT (4)..(4): / replace = "Trp"
  VARIANT (5)..(5): / replace = "Gly"
KIFSQL

SEQ ID NO: 671 - DNA, 851 bp, Populus trichocarpa
agcaacaacaacaacaaaaataacaatacttctctcaacatgaaagaaactgagctaaggcttggcttgccagggtctcatctccagagagaaaaccaacagtacccgcagctggggtgtctcttgttggaaaagatattgacaccaacaacactaatgctattctcttatcccagtaaagaatttagtgtcaggggctaagagagttttctcagatgccattgatgggtctactgggaatgggttttctctggtggcgataatggtaacccgcagaaatctcgggtagcaggacctgcgaagaaagatgttgctcaatcccaaagccagttcaagagaaaaacagccaagtggctgctgcaaatgagaacagcagtgctcctgctgcaaagacacaggtgtaggatggccaccaattcgctctttccggaagaacaccatggcctctagtttggcgaagaacaatgaagatgtcgacggaaatcaggatatggttacctgtatgtaaaggttagcatggatggtgctccataccttaggaaggttgaccttaaaacttaggcaattatctggagctctcatctgctcttgagaaaatgtttggctgcttcaccattggacaatgtggttctcatgggctgcagcgcgagatggcctaactgagagttgtttgaaggatctacatggttctgaatatgttctcacatttgaagacaaggaggtgattggatgctggttggtgatgttccttgggacatgtttaccgactcatgcaggagattgaggatcatgaaaggttcgaagcaattggacttgccccaagggccatggagaaatgcaagaaccgtaat

SEQ ID NO: 672 - protein, 284 aa, Populus trichocarpa
SNNNNKNNNTSLNMKETELRLGLPGSQSPERKPTVPAAGVSLVGKDIDTNNTNAYSLIPVKNLVSGAKRVFSDAIDGSTGWVFSGGDNGNPQKSRVAGPAKKDVAQSPKPVQEKNSQVAAANENSSAPAAKTQVVGWPPIRSFRKNTMASSLAKNNEDVDKSGYGYLYVKVSMDGAPYLRKVDLKTYGNYLELSSALEKMFGCFTIGQCGSHGLAARDGLTESCLKDLHGSEYVLTFEDKGDWMLVGDVPWDMFTDSCRRLRIMKGSEAIGLAPRAMEKCKNRN

SEQ ID NO: 673 - DNA, 466 bp, Populus trichocarpa
aaaaatgaaaagaaaagggttttctcagagttgtccggcgaagcaaacagcacaaccgatgggcgaaaaacccaaacaacagtcaagttgtggggtggccaccagtatgttcctatcgaaagaagaatagtttcaatgagaaagatagccatgaaacttcaaaatttacgtgaaagttagtatggacggagctccttttctcagaaaagttgatttgggcatgcacaaggagtattcggacttgttgtcgcgttggagaagttgtttggctgttttggaatcggcaaagccttgaaggatacagacgactgcgaatacgtcccatatatgaagacaaggatggagactggatgctagtgggagacgtgccttgggagatgtttattgagtcttgcaagagctaaggataatgaagaggtcagaagccaagggttttggactgcagccaagaggtgctcttcagcag

SEQ ID NO: 674 - protein, 156 aa, Populus trichocarpa
KNEKKRVFSELSGEANSTTDGRKTQTTSQVVGWPPVCSYRKKNSFNEKDSHETSKIYVKVSMDGAPFLRKVDLGMHKEYSLVVALEKLFGCFGIGKALKDTDDCEYVPIYEDKDGDWMLVGDVPWEMFIESCKRLRIMKRSEAKGFGLQPRGALQQ

SEQ ID NO: 675 - DNA, 466 bp, Populus trichocarpa; identical to SEQ ID NO: 673

SEQ ID NO: 676 - protein, 156 aa, Populus trichocarpa; identical to SEQ ID NO: 674

SEQ ID NO: 677 - DNA, 673 bp, Populus trichocarpa
atgcggtttgaggagacagagctaaggctagggttaccagggaatggtggagggggtactgaaggaggggagttcgcaagaagagaggattctctgagactgtggacttgaagctcaatctttcttccaaggaggggggtattgatccaaatcatgagaaactcaaagggagaagaaccttctggccactgatccagcaaaacctccagctaaggcacaggttgtgggttggcctccagtagatctttccgaaagaacatgttagctgtccaaaaaagcagcaccgatcaggagagtactgacaaggttcctgggggcaagcaacctttgtgaaggttagcatggatggcgcaccttacctccgtaaagtggacctgaagatgtacaagacctaccacgactctctgatgccttgggcaaaatgttcagttccttcaccataggcaactgtggatcccatggaatgaaagatttcctgaagaaagcaagctcatagatcttcttaatggcaccgactatgttccaacttatgaagataaggacggtgactggatgctcgtggagatgtcccatgggacatgtttgttgaatcatgcaagcggctgcgaataatgaaaggaacggaggcgactggacttgcccaagagccatggagaaatgcaagaacagaagc

SEQ ID NO: 678 - protein, 225 aa, Populus trichocarpa
MRFEETELRLGLPGNGGGGTEGGEFARKRGFSETVDLKLNLSSKEGGIDPNHEKTQREKNLLATDPAKPPAKAQVVGWPPRSFRKNMLAVQKSSTDQESTDKVPGGNATFVKVSMDGAPYLRKVDLKMYKTYHELSDALGKMFSSFTIGNCGSHGMKDFLESKLIDLLNGTDYVPTYEDKDGDWMLVGDVPWDMFVESCKRLRIMKGTEATGLAPRAMEKCKNRS

SEQ ID NO: 679 - DNA, 560 bp, Populus trichocarpa
atggattctaatgcatcaggcttccttctaaaccctccagctcttcactctacttactatcagcctagggaagatgatggattattgatctgggtctcagtctcagaactttgaagcctgaggcttatcatccatctggacatctggtaggcctggagggtatggtgacctgatggactggcctcgggcaaactcaccactaaaacactccacttcaagctacattagatttaccccacagattgtgacgaggaggcagagggagttcagagcaaagacaggtgggcttatgtgaaggtaaacatggatggggtgattgtggtaggaaaatatgcatgctagatcatggtggttactcaagcctcgcacttcagctcgaagacatgtttggtagacaatcgcatctgggttaaggctgttccaagcaggttctgaattctgcctgttctataaggacagagaggagaattggagaaccgtggtgatgttccttggaaggagtttgtagaaagcgtcaagcggctgaggattgcacgaaaaagcgaacctcttcttccata

SEQ ID NO: 680 - protein, 187 aa, Populus trichocarpa
MDSNASGFLLNPPALHSTYYQPREDDGIIDLGLSLRTLKPEAYHPSGHLVGLEGYGDLMDWPRANSPLKHSTSSYIRFTPDCDEEAEGVQSKDRWAYVKVNMDGVIVGRKICMLDHGGYSSLALQLEDMFGRQSASGLRLFQAGSEFCLFYKDREENWRTGDVPWKEFVESVKRLRIARKSEPLLPY

SEQ ID NO: 681 - DNA, 786 bp, Populus trichocarpa
gaagctgagctagagttgggtctggggctgagtcttggtagtggtggaggaggaaagggtaaggcaaatgcatggggtgatgtggtagaatcttgactgccaaggactttccttcggtggtctctcagcctcaaaggcccaacaacaacaactctatgcctctacctgtgttgttggtgctgtttctgggactaagagagctgctgactctgtctcccatgagggtggatcccctactgcggcagcagtcaggttgtggggtggcctcctataagggcttatcggatgaatagcttggtgagccaagcaaaggctgcgaggctgaagaagaaaagggaattggtgagaaggataaatctaaggagaatttgaagaagaaaatctgtaatggtaacaagacaatgctactggtaatgaaaaggggcatcttggatttgtcaaggtgaatatggatggagttccaattggaaggaaggtagattgaatgcccatgcttgttatgaaacattagcccaggcattagaggaaatgttcttcaggtccaccaccactatcaattcatcggtgagacgaagccactatcaaagttctctaagctattggatgggtcgtctgagtttgtgctcacttatgaagataagagggagactggatgctcgtgggagatgttccttgggggatgttcctcacctctgtaaaaaggcttcgaatcatgaggactcagaggccaatggacttgctccaagactccaggataggaatgagaaacaaagaagcaagcctgtt

SEQ ID NO: 682 - protein, 262 aa, Populus trichocarpa
EAELELGLGLSLGSGGGGKGKANAWGECGRILTAKDFPSVVSQPQRPNNNNSMPSTCVVGAVSGTKRAADSVSHEGGSPTGSSQVVGWPPIRAYRMNSLVSQAKAARAEEEKGIGEKDKSKENLKKKICNGNKTNATGNEKGHLGFVKVNMDGVPIGRKVLNAHACYETLAQALEEMFFRSTTTINSIGETKPLSKFSKLLDGSSEFVLTYEDKEGDWMLVGDVPWGMFLTSVKRLRIMRSEANGLAPRLQDRNEKQRSKPV

SEQ ID NO: 683 - DNA, 460 bp, Populus trichocarpa
agggcacaagttgtgggttggccacccattagatcattccgtaagaatgtcatggctgtacagaagaacagcaatgacaaggtgaaaaatccggtagcagtggcaccggtgtggcttttgttaaggttagcatggatggtgctccgtatttacgaaaagtgacttgaaattatacaagagctaccaagaactctctgacgctctaggcaaaatgttcagctccttcaccattggtaactgggctcacaaggaatgaaagatttcatgaatgaaagcaaattgatagatcttttgaatggttccgattatgtgccaacttagaagacaaggatggagattggatgcttgtaggagatgttccatgggaaatgtttgtggattcatgcaagcgcttgaggatatgaaagggtctgaggctattggacttgccccgagagccgtagagaagtgcaagaacaga

SEQ ID NO: 684 - protein, 154 aa, Populus trichocarpa
RAQVVGWPPIRSFRKNVMAVQKNSNDNGEKSGSSGTGVAFVKVSMDGAPYLRKVDLKLYKSYQELSDALGKMFSSFTIGNGSQGMKDFMNESKLIDLLNGSDYVPTYEDKDGDWMLVGDVPWEMFVDSCKRLRIMKGSEAIGLAPRAVEKCKNR

SEQ ID NO: 685 - DNA, 475 bp, Populus trichocarpa
agagctgcacttgcaccagtagtcgggtggcctccaatccggtcgtttaggaaaaaccttgcaggtagcagtactccaaactggtatctgagtcacgaaataaacctccaaaagaagggagtagcttaaaacctgacagtttcagaaatgacttgtttgtaagatcaatatggaaggagtccctattggaagaaaaataaacctcaatgcctatgacagttacgagaaactctctgttgcatagatgaactcttcagaggtcttcttgcagctcgaagagaaactgctgatcctaggaatgacaaaaaggtgaaagaagcaacgcaaatgcaggttcagtttctggaagtggggaatatactctcgtttatgaggacaatgaaggagacaggattcttgtggggatgttccatggcatatgtttgtatctacagcaaagagattgcgcgtactgaagagcactgagatttccact

SEQ ID NO: 686 - protein, 159 aa, Populus trichocarpa
RAALAPVVGWPPIRSFRKNLAGSSTPKLVSESRNKPPKEGSSLKPDSFRNDLFVKINMEGVPIGRKINLNAYDSYEKLSVIDELFRGLLAARRETADPRNDKKVKEANANAGSVSGSGEYTLVYEDNEGDRILVGDVPWHMFVSTAKRLRVLKSTEIST

SEQ ID NO: 687 - DNA, 655 bp, Populus trichocarpa
attaattatgaagagactgaattacgcctagggttacctggaggtgctagtaatggaaatgatggtgaggctgcaaagggaatgggaagagagggttttcagagacggttgacttgaagcttaacctttcaactaaagaaactggaaaggatggatcagacaggagaaagtagtaatgaaggagaaaactgttgctcctcgccccaatgatcctgcaaagccaccgtccaaggcacaagtgtgggttggccacccattagatcattccgtaaaaatgccagtagcagtggcactactggtactgcagctttcgttaaggtagcatggatggtgccccatacttgcgaaaagtggacttgaaattatacaagagctaccgagaactctctgatgctctaggaaaatgttcagctccttcaccatcggtaactgtggctcacaaggaacgaaagatttcatgaatgaaagcaaattgatagacttttgaatagttctgagtatgtgccaacttatgaagacaaggatggagattggatgcttgtaggagatgttccatggggatgtttgtcgattcatgcaagcgcttgaggatcatgaaagggtctgaggccattggacttgccccaagagctgtggagaatgcaagaacagaagt

SEQ ID NO: 688 - protein, 219 aa, Populus trichocarpa
INYEETELRLGLPGGASNGNDGEAAKGNGKRGFSETVDLKLNLSTKETGKDGSDQEKVVMKEKTVAPRPNDPAKPPSKAQVGWPPIRSFRKNASSSGTTGTAAFVKVSMDGAPYLRKVDLKLYKSYRELSDALGKMFSSFTIGNCGSQGTKDFMNESKLILLNSSEYVPTYEDKDGDWMLVGDVPWGMFVDSCKRLRIMKGSEAIGLAPRAVEKCKNRS

SEQ ID NO: 689 - DNA, 480 bp, Populus trichocarpa
gcaacagtagttgggtggcctccaatccggtcattcaggaaaaatattgcaagtagcagtacttcaaagatggtatctgattaccaaataaaacttcagaagaagggagcagcttaaagcctgacagtttcaggaatgatttgtttgtaaagatcaatatgaaggagtccctattggaagaaaaataaacctcaatgcctatgacagttatgagaaactctctgttgccatagatgagctttcagaggttttcttgcagctcaaagggaaacttgtgatcctatgggtgaaaacaagatggatgaagcaaaggaaaattgtcagtttctggtagcagggaatatactctcgtttatgaggacaatgaaggtgacaggattcttgttggagatgttccttgcatatgtttgtatctacagcgaagagactgcgcgtactgaagagcactgagaaaggtgcgtttactttaaagtcatcgag

SEQ ID NO: 690 - protein, 160 aa, Populus trichocarpa
ATVVGWPPIRSFRKNIASSSTSKMVSELPNKTSEEGSSLKPDSFRNDLFVKINMEGVPIGRKINLNAYDSYEKLSVAIDEFRGFLAAQRETCDPMGENKMDEAKENCSVSGSREYTLVYEDNEGDRILVGDVPWHMFVSTAKRLRVLKSTEKGAFTLKSS

SEQ ID NO: 691 - DNA, 892 bp, Populus trichocarpa
atggagcttcaactaggtctttcccttccaacctacaattttattgaaaactttgacctgaacaatggtgggtttgagccaaagatcagatgcttggttcgaaaccatggatcagctgcgaagatggtaattacttggacaacaaacgtagctttgaagtgcctttgaaaagaatatcaaagatgcatctcaagaattgcctttacttttatggagtggccaaccaaatgatgaagatgatggaatggagagaagaaaatctctcgtagcattaacaaggatgatgaagaggaaaatcaagttgtggggtggccacctataagtcatggaggaagaaggtgcttcatcaccagcatcaagctggtcatgttgtgaatagtactagaatggcaacagctggaattatgaatatggtactggatcaaactccaagtatgtcaaggtgaagatggaaggagtagcaataacaagaaagattgattaaggctctacaactcttaccagacactcacaaaatccttgatcagcatgtttgcaaaatgcaaaaaccttgaaaaagagctgcacgttacagtctgacataccaagacaaagatggggactggctaattgcaggagatgttccatggcagactttcatgagtctgtgcagcgtttgaagatagtaaggaatgctggttaaattggtttggattgatgatcaattattgtgtccctgtgtacagtgtactataagagatcgcatgtatttataccctagtgttagaggaagagcataattaattagattattaagccttaattaaatgttgtattggatgtaattgaagtaatttagcattgtaagtttgtaatcttaatttgttgttaattccatcattaagttgtcttg

SEQ ID NO: 692 - protein, 227 aa, Populus trichocarpa
MELQLGLSLPTYNFIENFDLNNGGFEPKDQMLGSKPWISCEDGNYLDNKRSFEVAFEKNIKDASQELPLLLWSGQPNDEDWNGEKKISRSINKDDEEENQVVGWPPIKSWRKKVLHHQHQAGHVVNSTRMATAGNYEYGTGSNSKYVKVKMEGVAITRKILRLYNSYQTLTKSLISMFAKCKNLEKDAARYSLTYQDKDGDWLIAGDVPWQTFMESVQRLKIVRNAG

SEQ ID NO: 693 - DNA, 255 bp, Populus trichocarpa
ccctcgcagagagaatactagctattatttatttctctcaagaatctacatatcaaaaggaaacaacaagagcaatcttcagtctcctgtgtacatcatctctttacagatcctgcgcgtgaacaaagattgttggaaaacatggaaggtggtgttgcattgagaatgatctaaacctcaaggaaactgagcttagactgggtttgccagggacgggttgtaccaatgagaaaggagttttggtgctagaaacaa

SEQ ID NO: 694 - protein, 205 aa, Populus trichocarpa
MEGGVAYENDLNLKETELRLGLPGTGCTNEKGVSGARNNKRPFPETREEGGANGKSDAQHDDQETASAPNTYSFDMHATCVQIVGWPPIRSYRKNSLQPKKAEDEAAAGMYVKVSMDGAPYLRKIDLKVYKGYPELLKALENMFKLTIGEYSEREGYKGSYAPTYEDKDGDWMLVGDVPWDMFLSSCKKLRIMKGSEAIGLGCGA

SEQ ID NO: 695 - DNA, 255 bp, Populus trichocarpa
gaagcccaacttatattattgaggtctctctctctctctctctctctcagctagcttgcaaaacatagaagaggacacaaaaataagaaacaaagaaacgagcaaaagctagctatcagcaacaccaaaagcaacaagcaataatacaaaacatatcagacttccactaaaaccattcattggcgcgcgcgtggcagagagaaatggcaacagctaccgtgttaggtaccgagatggcagtttgaactacaaaga

SEQ ID NO: 696 - protein, 274 aa, Populus trichocarpa
MATATVLGTEMADLNYKETELCLGLPGAVGVKNEVETPNKATGKRGFAETVDLKLNLQAKEGVMDLNENIKNIASKDKNHPADTIKDPAKPPAKAQVVGWPPVRSYRKNVLAQKNASEEGFRAQVVGWPPLRSYRKNVLTQKNASEEGDKASTGGSSAAFKVCMDGAPYLRKVDLKMYKSYQELSDALAKMFSSFTMGNYGAQGMIDFMNESKLMDLLNSSEYVPSYEDKDGDWMLVGDVWEMFVDSCKRLRIMKGSEAIGLAPRAMEKCKSRT

SEQ ID NO: 697 - DNA, 694 bp, Populus trichocarpa
atggaacttcaacttggtctcggtctcccaagtgagaaaacaatgaagggtttagacctaaacagctatgtttctgagccaaagggttgctgggctcgggacaacttcaactgggtcaatattcatggttttctacgaatgctaatgacaagaaacggagtttattgatgcctttgaagagagctcaggaaatgaagatgggcctcaaacgttacctctcttggtttggaataaccagccaacgacgaagatgatttccctaaagatctcgacaaccatagtagcaactcttgtgcctccaacaaaagtgatggagaaaggattggatagtggggtggccaccaataaagttcaagaagaagaagcttagtcgtcaaagcagcagggcgctagagatcaacgggcagtggacaatggttatgaagattgccaagctagaacatcaaagtatatgtacattaaggtcaagatggagggggtggaatagcaaggaaaattgatgttagcctccaccattcttttccaacactcaagcagaccttgcttgacatgtttgggattgccaggaaaattcaagcaactacagactgacttaccaggatagagaaggtgactggctactagctgaagatgtaccttgaggaactttcttgggacagtccaactactaaaattgatgaggagaagcagctga

SEQ ID NO: 698 - protein, 231 aa, Populus trichocarpa
MELQLGLGLPSEKTMKGLDLNSYVSEPKGLLGSGQLQLGQYSWFSTNANDKKRSFIDAFEESSGNEDGPQTLPLLVWNNQNDEDDFPKDLDNHSSNSCASNKSDGESDWIVGWPPIKFKKKKLSRQSSRALEINRAVDNGYEDCQARTSKYMYIKVKMEGGIARKIDVSLHHSFPTLKQTLLDMFGICQENSSNYRLTYQDREGDWLLAEDVPWRNFLGTVQLLKLMRRSS

SEQ ID NO: 699 - DNA, 255 bp, Populus trichocarpa
gtacatttcttaatattccatccatcactcaaaaggaaaaaagaaaaaagaaaaaaatctatcctttctctatcttttttcctttcttcttcttgaaaaccagtgcatgcttttgttttgagcgagctttgctttttgatgtctatgcccttagagcatgttacataggcatatcatctgaggtttcttcaatggaaaacacctctggtactgatacaataaacatctctaccactgctttaaaggtcttaactt

SEQ ID NO: 700 - protein, 304 aa, Populus trichocarpa
MSMPLEHDYIGISSEVSSMENTSGTDTINISTTASKGLNLKATELRLGLPGSDSPERGNENQQLGFSLNNNNSKDKSFVSARRGFSVAIHGGSANWVFSGNAGSDPNFSLRGANSGKEGFPHSSKPVVQENKSQVDGANTNGHGAAPASKAQVVGWPPIRFRKNTMASHLSKNDDGAEVKSGSGCLYVKVSMDGAPYLRKVDLKTFGSYMELSSALEKMFSCFTIGQCGSHVVPGQDGLSSRLMDLLHGSEYVLTYEDKDNDWMLVGDVPWKMFTDSCRRLRIMKGSEAIGLAPRAMEKCKSRN

SEQ ID NO: 701 - DNA, 255 bp, Populus trichocarpa
tcaagtgcaattacaacaacacaggaaatactgaaggttgaatttgctaccatttcggaagaggaacaagcttcagtttaatccaaagatcgttgaacaaagaaaagagaagaatggaatttgagagagatcttaaccttgaggcgacagagctcagattggcctaccgggcactgccacagaacagttggagaagcaaacacctaactcaaatgttaccaagagcaacaaaagatcattcctgacatgaatgaa

SEQ ID NO: 702 - protein, 199 aa, Populus trichocarpa
MEFERDLNLEATELRLGLPGTATEQLEKQTPNSNVTKSNKRSLPDMNEDSAGRRESSSVSSNDKKSHEQETAPPTKTQVVWPPIRSYRKNCLQARKLEAEAAGLYVKVSMDGAPYLRKIDLKVYKGYPELLEVVEEMFKFKVGEYSEREGYNGSEYVPTYDKDGDWMLVGDVPWEMFINSCKRLRIMKESEARGLGCAV

SEQ ID NO: 703 - DNA, 766 bp, Populus trichocarpa
atgctccttcaaaacagaactgctcctggtccagttgttggttggcctccaattcgttctttcaggaagaatcttgcaagagtagcggcagctattcaaaaccaaccgttgagtctcaaaacaaaccagttgaaacttgcaagaaagggttatttgtcaaatcaatatggaaggtgtccccataggaaggaaagttgacctgaaagcctatgatacctacgaaaaactctccattgctgtgatgaactctttagaggccttcttgcagctcaaagagattcctcttccaatggaatcatggacaagcaagaggaagctaagcaataacgggtgtattggacggaagtggagaatatacccttgtttatgaggataatgaaggagacatgatgcttgttgggatgtcccatggcacatgtttgtgtccacagtgaagaggctgcgtgtattgaagagctctgaagtttctgcgttgagcctggaagcatcaagcaagagaaggtggccgtgaattaagaggaacaaagaaattaagatgaatttttctgtgaagattctccctgaagagttgattttgcgtccttgttttgtttttatcaatcttgtattgagcttgtgcgactcgaagtatatataattatatatttagctcctttttccttgtatctcttctcctgcccaacataacgctattatcttgatgcccctttctttttgcgagctgtgtaacaaccgtgtttggagcccactgaacagtttttgttcg

SEQ ID NO: 704 - protein, 171 aa, Populus trichocarpa
MLLQNRTAPGPVVGWPPIRSFRKNLASSSGSYSKPTVESQNKPVETCKKGLFVKINMEGVPIGRKVDLKAYDTYEKLSIADELFRGLLAAQRDSSSNGIMDKQEEAKAITGVLDGSGEYTLVYEDNEGDMMLVGDVPWHMFVSTVKRLRVLKSSEVSALSGSIKQEKVAVN

SEQ ID NO: 705 - DNA, 255 bp, Populus trichocarpa
gctaacacacaactgcgtgccaattataagcttagagagagaacagagagagtgggttttagagagagagaaagggagtgtcagtttctgagaggaaactaagagagagcgggcaaaaaagtattctcatcatggaagtggagaagggaacaaagatgggtttgaggagacagagctaaggctagggttgccagggaatggtggaggggctgaaggagagatggtgaggaagagaggatttctgagactgtggac

SEQ ID NO: 706 - protein, 235 aa, Populus trichocarpa
MEVEKGTKMGFEETELRLGLPGNGGGAEGEMVRKRGFSETVDLKLKLSSKESGADPNHEKTSSLQREKNLLATDPAKPPAAQVVGWPPVRSFRKNMLAVQKSSTDQECEKVPGGNATFVKVSMDGAPYLRKVDLKMYKTYQELSDALGKMFSSFTIGNCGHGLKDFLNESKLIDLLNGTDYVPTYEDKDGDWMLVGDVPWDMFVESCKRLRIMKGTEATGLAPRAMEKCKNRSYK

SEQ ID NO: 707 - DNA, 829 bp, Populus trichocarpa
atgccggctacatggacaacatatcagggccgtgagctgcatgaggagatgcctttcctcactatattaatactcataaagtggtatgctctctatgctatgtatttgagcctaaggtggcggcttcattagcttcacatctccaaaaatgggcagaggactgcctctagctcttcatcatctttcgaaagcagccgctacccatctgtctccggcgagtcttctttccctcatgtaaaggggaccttagcacagatctaaggcttggacttggcatatcaacctctcgacaggacaacccttccacaccaagtgagcagtattggattggccaccgatcaagccgtctccggggaaggcagtaacatcagaagaaaatgagtgctgtagttccaccttatcgtcaaggtgtacatggaaggcattcaaattggaaggaaactgaacctattagcccacgatggttaccatgacttgataagactctcgacgaaatgttcaacactagcattctctggcctgaaatggatgttgaacattccgggaaatgccatgtgctgcatatgaagacaaagagggcgattggttgattgttggggatgttccatgggaggtgttcttaccttctgtgcggagattgagatcaccagggcagacagcctatgattttggttcatgattcatatgcagtctcctcttctccctagacatgcacttgtaatggtgaatcgaaaataactaggtagtggacagctaggtaactccaaatgaatatgttgaggatgatagaacaaaagctgtcttttgttgtaaattaaggattttcaga

SEQ ID NO: 708 - protein, 172 aa, Populus trichocarpa
MGRGAASSSSSSFESSRYPSVSGESSFPHVKRDLSTDLRLGLGISTSRQDNPSTPSEQLLDWPPIKPSPGKAVTSEENECSSTLFVKVYMEGIQIGRKLNLLAHDGYHDLIQTLDEMFNTSILWPEMDVEHSGKCHVLTYEDKEGDWLIVGDVPWEVFLPVRRLKITRADSL

SEQ ID NO: 709 - DNA, 606 bp, Populus trichocarpa
attcggtctttcaggaagaatcttgcaaccagcagcggcagcaattcaaaaccaacctttgagtctcaaaataaaccagcggaacttgcaagaaggggttatttgtcaagatcaatatggaaggtgtccccataggaaggaaagtggacctcaaagcctagatagctatgaaaaactctcaactgctgttgatgaactctttagaggccttcttgcagctcaaagagattcctcttgtaaggaatcatgaacaagcaagagggagagaaagcaattatgggtgtattggacggaagtggggaatataagcttgtttatgagataatgaaggagacaggatgcttgttggggatgtcccatggcacatgtttgtttccacagtgaagaggctgcgtgtattaagagctctgaagtttctgcactgaaccttggaagcagcaagcacgagaaggtgcccgtgtgaatcaagtgaacaaattggatgagttttgctgtgaagattttccactcgtgtgactaagaaaactgggattccgtggtccttattttgtttatctaattgtattgaactttttgcaactcaaagtatatataattactagttat

SEQ ID NO: 710 - protein, 115 aa, Populus trichocarpa
MEGVPIGRKVDLKAYDSYEKLSTAVDELFRGLLAAQRDSSCNGIMNKQEGEKAIMGVLDGSGEYKLVYEDNEGDRMLVGDPWHMFVSTVKRLRVLKSSEVSALNLGSSKHEKVPV

SEQ ID NO: 711 - DNA, 768 bp, Populus trichocarpa
tttggcttcacacctccaaaatgggcagaggagctacctctagttcttcatcttcttttgaaagcagcaactacccatcttatcaagcaagtcttctctctctcagctaaagaaagacctaagcacagatctcaggcttggacttagcatctcaacctctaacaggagaacccttctacaccaagtgatcagcaactttcggactggccaccaatcaagccatttctaaggaaggcattacgtcagaagaaaatgagtgcagtagtgccaccttcttcgtcaaggtttacatggaaggcattccgattggaaggaagctcacctcttagcccatgatggttaccatgacttaatacagactcttgaccaaatgttcaacactagcattctctggcctgaatggatattgaacattctgggcaatgtcatgtgttgacatatgaagacaaagagggggattggttgattgttggggatgttcctgggagatgttcttaccttctgtgcggagattgaagatcactagggcagacagcctatgattttggttcatgctgatgtcactagggcagacagcctatatgattttggttcatgatcgatgcttatgcggtctccttttctccttgacacatatatatatggcgagtcgaaaataaataggtagtggatagctaggtaactctatatgaagtgttgagaatcacgtttgcacttgtaatcatccttgggataaatgatagaacaaaagttgtcttttgattgtaa

SEQ ID NO: 712 - protein, 173 aa, Populus trichocarpa
MGRGATSSSSSSFESSNYPSVSSKSSLSQLKKDLSTDLRLGLSISTSQQENPSTPSDQQLSDWPPIKPFLRKALASEENESSATFFVKVYMEGIPIGRKLNLLAHDGYHDLIQTLDQMFNTSILWPEMDIEHSGQCHVLTYEDKEGDWLIVGDVPWEMFLSVRRLKITRADSL

SEQ ID NO: 713 - DNA, 255 bp, Populus trichocarpa
acataatttagaagtgcctccccttttcatttcaacacgttaagtgccctcctagaattcatcgtcgcggatagtagcgtcagaaaatgtcaccggaaaatggttcaaacttgctggaatccgatgcggccaacgtgagtttcaaggagacagagttgacttagggctgcctggtgagtctcgtgggctagcattaatagagaaaacaagtggcaagcgtgggtttttggagactgttgactaaatcttggaagg

SEQ ID NO: 714 - protein, 218 aa, Populus trichocarpa
MSPENGSNLLESDAANVSFKETELTLGLPGESRGLALIEKTSGKRGFLETVDLNLGRSSNVDSDHNKYSGESETDVPNTAPPAAKAQVVGWPPVRAYRKNAMKSCKYVKVAVDGAPYLRKVDLEMYNSYQQLLNALQDMFSCFSFTIRNYLNERTIMEQENNGVEYVPTYEDKDGDWMMLGDVPWKMFVESCKRLRLMKSSEATGFAPRTPSKCSSSS

SEQ ID NO: 715 - DNA, 255 bp, Populus trichocarpa
aagccaagccaaaccaaaccaaaccaaatatcaatatcaagccttcaattttgttgtttctcctctcatatatttacgattctttgcttctaaattaaccctttcgtgaacctcttctttccctttcttttctttgatgcaaggtggttttcttggtggagaagtggtgggtcggtgtgtatgtcgacggtgtcaatggaggataacgtgttgatgtcatctgaggactcgtcaagcccgatgagggtgaacttg

SEQ ID NO: 716 - protein, 287 aa, Populus trichocarpa
MQGGFLGGGSGGSVCMSTVSMEDNVLMSSEDSSSPDEGELELGLGLSLGGASGFKDFGQRSSQQYARILTAKDLPSKVSSSCCSSTTSSSSSTLSRANATAGTKRAADSVSASNGAASSQVVGWPPIRSHRMHIMVNQAKSQATEEFNSMNKRKNAVEEKGNKNINIGNTKTRTSLFVKVNMDGTLIGRKVDLNAHGCYETLAQALENMFLRTTTTLNMARLSTPEHKIMIDAKRHSQLLGSSEFVLTYEDKDGDWMLVGDVPWGMFISSVKRLRIMRMSEATGLGK

SEQ ID NO: 717 - DNA, 255 bp, Populus trichocarpa
tattttcactacttctgtgaccaactttgatgtcttctattccaaaggaacatgattacataggcttgtcagagactcctcaatggaaaaaatctctgacaagctctcctcttcctcctctaccctctccactgaagagaatatcaacagcaacagcaacgcaacagcaacagcaccaatacttctctcaacttgaaagaaactgagctaaggcttggcttgccagggtatcagtctccaagagaaaactaacac

SEQ ID NO: 718 - protein, 345 aa, Populus trichocarpa
MSSIPKEHDYIGLSETPSMEKISDKLSSSSSTLSTEENINSNSNSNSNSTNTSLNLKETELRLGLPGYQSPERKLTLPAAVSLFGKDIDTNNTNGYPLRPLKNLVSGTKRGFSDAIVGSSGKWVFSGSNGSEVDLGKGAILFSPRGDNGNSQKSCVAGPAKDDVAQSPKPVQEKISQVAAANENSSAPAAKAQVVGWPPIRSFRKNTMASSLVKNNEDVEGKSGYGCLYVKVSMDGAPYLKVDLKTYSNYLELSSALEKMFSCFTIGQCGSHGLRGQDGLTESRLKDILHGSEYVLTYEDKDGDWMLVGDVPWDMFTNSCRLRIMKGSEAIGLAPRAMEKCKNRN

SEQ ID NO: 719 - DNA, 255 bp, Populus trichocarpa
ctagctagttagcttgcaaaacaaagaagaggacacgggaaatcagaagcaaggagctagctatctacagcaccaaaaacacaagcaataatacaaaacacgttagatcttccactaaagccattcattggcgagcgcgcggtagagagaaatgacaactctgtgctaggtaccgagcgaactgatttgaactacaaagagactgagctgtgtctgggattgcctggtgctgttggtgccagaatgaagttgaga

SEQ ID NO: 720 - protein, 245 aa, Populus trichocarpa
MTTSVLGTERTDLNYKETELCLGLPGAVGAKNEVETPNKATGKRGFAETVDLKLNLQAKEGVMDLNENIKNITSKDKNHLAVTIKDPAKPPAKAQVVGWPPVRSYRKNVMAQKNASEEGEKASTGGSSAAFVKVCMDGAPYLRKVDLKMYRSYQELSDALKMFSSFTMGNYGAQGMIDFMNESKLMDLLNSSEYVPSYEDKDGDWMLVGDVPWEMFVNSCKRLRIMKGSEAIGLAPRAMECKSRT

SEQ ID NO: 721 - DNA, 255 bp, Populus trichocarpa
gcctcaaaggtgctgctattgctaccgacaggcttagcttgcctttgtccataattcatgcatttgaagagagaataacaggcatttctctcaacctcttccttttgtatataaaatacacttgtttccattcacacctgcatcccctcacagaaaaactgctaccatttctctcaagaatcattaccaaaggaaatcacaagagcaacttccaagtcttgtatacatcatctcttagcattcctgtttttgaac

SEQ ID NO: 722 - protein, 190 aa, Populus trichocarpa
MEGGVAYENDLNLKATELRLGLPGTSCTNEEQAVSGARNNKRPLPETREERGAKGKSDPRHDDQETAPAPKAQIVGWPPISYRKNTLQPKKAEAEAAAGMYVKVSMDGAPYLRKIDLKVYKGYPELLKALENMFKLTIGEYSEREGYKGSEYAPTYEDKDDWMLIGDVPWDMFLSSCKKLRIIKGSEATG

SEQ ID NO: 723 - DNA, 694 bp, Populus trichocarpa
atggaacttcaacttggtctcggtcttccaagtgaaaaaacaatgaagggtttggacctaaacagctatgtttcggagccaaagagttgctgggctcgggccaacttcacctgggttcatattcgtggttttctacaaatgataatgacaagaaacggagtttattgatgcctctgaagagagctcgagaaatgaagacgtgcctcgaacgctgcctctcttggtttggaataaccagccaacgaggaagatgatccgcctaaagatcttgataaccactgcaactactctttttcctccaacaaaagtgatggagaaaggatggaatagtggggtggccaccaataaagttcaagaggaagaagcttagtcgtcaaaacagtagagtgctagaggttaacgggcagtggacaatggttgtgaagattgccaagctagatcatcaaactccatgtacattaaggtcaagatggagggagtggaatagcaaggaaaattgatgttagcgtctaccgttgctttccaacacttaaacatacgttgcttgacatgtttgggattgccaggaaaattcaagcaactacagactgacttaccaggatagagaaggtgactggctactagctgaagatgtaccttgaggaactttcttgggtcagtccaacgactaaaactgatgaggagcagcaattga

SEQ ID NO: 724 - protein, 231 aa, Populus trichocarpa
MELQLGLGLPSEKTMKGLDLNSYVSEPKELLGSGQLHLGSYSWFSTNDNDKKRSFIDASEESSRNEDVPRTLPLLVWNNQNEEDDPPKDLDNHCNYSFSSNKSDGESDGIVGWPPIKFKRKKLSRQNSRVLEVNRAVDNGCEDCQARSSNSMYIKVKMEGGIARKIDVSVYRCFPTLKHTLLDMFGICQENSSNYRLTYQDREGDWLLAEDVPWRNFLGSVQRLKLMRSSN

SEQ ID NO: 725 - DNA, 593 bp, Populus trichocarpa
atggagaggtcaatggcatacgaaagacatctaaatctaaaggcaacagaactgagattagggttgcctggaagcgatgaccagagaaaccatcaactactcctagtgttaggagtaacaagagagcatcaccagaaatatcagaggagtctaggtccaaggcagctctagtctgtcctccaatgttgaaaatagtgaaggagatgatgctcctcctgccaaggcacaagtagtgggatgccaccaatccgatcttacaggaaaaattgcttgcaaccaaagaaaaacgatcgagttgatggtgctggaatgtacgtcaagtgagcgtggatggagctccttatctcaggaagattgatcttaaggtgtacaggagctacccagagctcctcaaagcattgaagatatgttcaagcttaccatcggagagtactcggagaaggaaggatacaatggatctgactttgctcctacttacgagataaagatggagactggatgcttgttggagacgttccatgggatatgtttatctccacctgcaagaggctgagaattataagggatcagaagctagaggattgggttgttaa

SEQ ID NO: 726 - protein, 197 aa, Populus trichocarpa
MERSMAYERHLNLKATELRLGLPGSDEPEKPSTTPSVRSNKRASPEISEESRSKGSSSLSSNVENSEGDDAPPAKAQVVGPPIRSYRKNCLQPKKNDRVDGAGMYVKVSVDGAPYLRKIDLKVYRSYPELLKALEDMFKLTIGEYSEKEGYNGSDFAPTYDKDGDWMLVGDVPWDMFISTCKRLRIMKGSEARGLGC

SEQ ID NO: 727 - DNA, 768 bp, Populus trichocarpa
atgtcaaaagtggaggtggtggaggctgaggcaagttcatatccagtggaagctgagctggagctggggctgagtcttggagtggtggtcgtggtggtggtggtggagggaagggtaaggcaaatgcacggggtgagcgtggcagaatcttgactgccaagactttccttcggtgagagctgctgactctgtctcccatgagggtggatcccctactgctggcagtcaggttgtggggtgcctcctataagggcttatcggatgaatagcttggtgaaccaagcaaaggctgcaagagctgaagaagacaagggaattgggagaaggatatatctaaggataatttgaagaagaaaatctgtaatggtaacaagaccagtgctcctagtaatgaaaagggcatcttggatttgtcaaggtgaatatggatgggattccaattggaaggaaggtagatttgaatgctcatgcttgctatgaacattagctcaagcattggaggaaatgtttttcaggtccgccacaactatcaattccattggtggcgagaagcggcaagtacgaagccctccaagttattggatggattgtccgagttcctactcacttatgaagataaagagggagactggatgcttgtggagatgttccgtgggggatgttcctcaactcagtaaaaaggcttaggatcatgaggacctcggaggccaatggacttgcccaagattccaggataggaatgagaaacaaagaataaagcctgtttag

SEQ ID NO: 728 - protein, 255 aa, Populus trichocarpa
MSKVEVVEAEASSYPVEAELELGLSLGSGGRGGGGGGKGKANARGERGRILTAKDFPSVRAADSVSHEGGSPTAGSQVVGPPIRAYRMNSLVNQAKAARAEEDKGIGEKDISKDNLKKKICNGNKTSAPSNEKGHLGFVKVNMDGIPIGRKVDLNAHACYTLAQALEEMFFRSATTINSIGGEKRQVTKPSKLLDGLSEFLLTYEDKEGDWMLVGDVPWGMFLNSVKRLRIMRTSEANGLPRFQDRNEKQRIKPV

SEQ ID NO: 729 - DNA, 255 bp, Populus trichocarpa
atggaatttgagagagatcttaatcttgatgcaacagagcttaggttaggcctccccggcactgccacaaaacagtcagaaagcaaacacctaactcaaatcttgccaagagcaacaaaagatcattgcctgacatgaatgaagagcccgcaggatcatcagggaaaattctagcactgtctcatcaaatgacaaaaaaagccatgaccaagaaactgctccacccatcaaggcacaagtgtagggtggccacca

SEQ ID NO: 730 - protein, 201 aa, Populus trichocarpa
MEFERDLNLDATELRLGLPGTATKQSEKQTPNSNLAKSNKRSLPDMNEEPAGSSRENSSTVSSNDKKSHDQETAPPIKAQVGWPPIRSYRKNCLQAKKLEAEAAGLYVKVSMDGAPYLRKIDLKVYKGYPELLKALEEMFKSKVGEYSEREGYNGSEHVPYEDKDGDWMLVGDVPWDMFINSCKRLRIMKESEARGLGCAV

SEQ ID NO: 731 - DNA, 255 bp, Populus trichocarpa
acaccagacagcaaataagcttttgttactttgtgccaaaatggaggatccttagctctctctctctggctatctctctccctctacttctctttccaaactccctctctctctctgcttctaaaacagaaacaaaaccctcacaattgaaatcttcactctcttctccagctacaaatccacaaatctaagtcacaggtaacaaaaagaattccgagtgtttttattctcaattctgattctccaccactactt

SEQ ID NO: 732 - protein, 362 aa, Populus trichocarpa
MSPPLLGVVEEEGHSNVTLLASPASAESACLNGLELKERNYMGLSDCSSVDSSAVSAASDERKTSLNLKATELRLGLPGSSPERNHELSLLSSALLDEKPFFPLHPSNDGHYSSTQKNVVSGNKRVFSDAMDEFSESKFLSNSEVNAMLSPRPSPNMGLKGMLENLGVQQAKVKEIVAPKAGQERPHAANETRPLRNSSANNSSAPAPKAQVVGWPPIKSFRKNSLATTSKNTEEVDGKAPGALFIKVSMDGAPYLRKVDLRNYSAYQELSSALEKMFSCFTIGQYGSHGAPGREMLSESKLKDLLHGSEYVLTYEDKDGWMLVGDVPWEMFIETCKRLRIMKSSDAIGLAPRAMEKCKNRN

SEQ ID NO: 733 - DNA, 911 bp, Populus trichocarpa
agagttaacaaactatataacattttgaaaccgtggagccaaaaaaaaaccaagttcagaggaagaaaattgaaacctttcccatcaccaagaaaagaaaatggcacaacctcttggacttgaaatcacagagctaaggttgggtctaccgggcagcgatatggacataaaaatgacaagaaaagggttttctctgaggtgtccggcgaagcaaacagcacaaccgatgaccgaaaagttaaacaaagagtcaagttgtggggtggccaccagtttgttcgtatcgaaaaaacattagtttcaatgagagagatcgccatatgaaacttcaaaaatttacgtgaaagtaagcatggatggagctccttttcttcgaaaaattgatttgggcatgcataaaagtattcggatcttgttgtcgcgttggagaggttgtttggctgttatggaattggcaaagccttgaaggatgaatacgttccatatatgaagacaaggatggagactggatgctagtgggagacgtgccttgggagatgttttttgagtcttgcaagaggtaaggatcatgaagagttcagaagccaaaggttttgggctgcagccaagaggcgctcttaagggaatttcaaaagatgaagtcactgagaaactacaacatattgaactcgggagaacttgactgaattgtcttaatttttcgtgagcataaacatttcttttaattggtaattattggttaattaagaacagacgattcaccatcaagttgtagcttaatttgagacctgtttttatattttaaactgggacttataggaccctagatagaaaagacaactagcttgtttttcacgattaaatccatcctgctatatgttttttttccattattatttttgaatcatgaa

SEQ ID NO: 734 - protein, 182 aa, Populus trichocarpa
MAQPLGLEITELRLGLPGSDDGHKNDKKRVFSEVSGEANSTTDDRKVQTKSQVVGWPPVCSYRKNISFNERDRHHETSKIVKVSMDGAPFLRKIDLGMHKEYSDLVVALERLFGCYGIGKALKDEYVPIYEDKDGDWMLVGDVPWEMFFESCKRLRIMKSEAKGFGLQPRGALKGISKDERH

SEQ ID NO: 735 - DNA, 865 bp, Populus trichocarpa
atggcatacgaaagcgatctaaatctaaaggcaacagaactgaggttagggttgcctggaagtgatgagccagagaaacctcaactactcctagtgttaggagtaataagagagcctcgccagaaatatcagaggagtccaggtccaagggcagttctaggtgtcctccaatgtcgaaaatggtgaaagagacagtgcccctcctgccaaggcacaagtagtgggatggccaccaatccgtcttataggaaaaattgcttgcaaccaaagaaaaatgatcaagttgatggtgctggcatgtacgtaaaagtgagcgtggaggagctccttatctcaggaagattgatcttaaggtgtacaagagctacccagagctcctcaaagccttggagaatatgttaagcttaccattggtgaatactcagagaatgaagggtacaacggatctgaatttgctcctacttacgaagataaagatgggactggatgctagttggcgacgttccatgggacatgtttatctcctcctgcaagaggctgagaattatgaaaggatcagagctagaggattgggctgttgataaaacaaaaaacaaaacttgaaacctgtcaacaaaaggagatatggtgatttaggggagagtaatttggctttggatatattctccgagagattaggtctcttaggaacagaaacaagttgatcagatcttcttttttggcttcggttctccctccttggttttggtttccaagatctggatatgtatcaattaaactatagagacagaaagatcacattttttatctgaattatatataaacgagcgagtctccaatattcagtgctagttacagaaaaaaa

SEQ ID NO: 736 - protein, 193 aa, Populus trichocarpa
MAYESDLNLKATELRLGLPGSDEPEKPSTTPSVRSNKRASPEISEESRSKGSSSVSSNVENGERDSAPPAKAQVVGWPPISYRKNCLQPKKNDQVDGAGMYVKVSVDGAPYLRKIDLKVYKSYPELLKALENMFKLTIGEYSENEGYNGSEFAPTYEDKDDWMLVGDVPWDMFISSCKRLRIMKGSEARGLGC

SEQ ID NO: 737 - DNA, 1482 bp, Arabidopsis thaliana
gttcccctcttatcaaacttcacccccaacaagagttatcgagagagagagaaaacatattctgatttaagacatatatagacagcaagaagagatatgaaccttaaggagacggagctttgtcttggcctccccggaggcactgaaaccgttgaaagtccggccaagtcgggtgttgggaacaagagaggcttctccgagaccgttgatctcaaacttaatcttcaatctaacaaacaaggacatgtggatctcaacactaatggagctcccaaggagaagaccttccttaaagacccttctaagcctcctgctaaagcacaagtggtgggttggccaccggtgaggaactaccggaaaaatgttatggctaatcagaagagcggcgaagcagaggaggcaatgagtagtggtggaggaaccgtcgcctttgtgaaggtttccatggatggagctccttatcttcggaaggttgacctcaagatgtacaccagctacaaggatctctctgatgccttggccaaaatgttcagctcctttaccatggggagttatggagcacaagggatgatagatttcatgaacgagagtaaagtgatggatctgttgaacagttctgagtatgttccaagctacgaggacaaagatggtgactggatgctcgttggtgatgtcccctggccgatgtttgtcgagtcatgcaaacgtttgcgcataatgaaaggatccgaagcaattggacttgctccaagagcaatggagaagttcaagaacagatcatgaacaaaaaaaaaagaggacaatatgcattgattttttttttttggtattgttatgatcatgtgtttttaatttaaaatattggaagtatataggaaaatataattgtttacgaaaaaaataactttaaatatgtctttttttttttttttgaaattagtctgtgtttttgttttcatctcttaattagtagaaatcattttttaatatgtaattgtgatagtaaatctatagagttcgtatttttgctatttaaaatttaaaatgctaatactatatataatttatgataggtaaatttacgttaaataatttatctccacttttcctactttattattcttttcctctttattttctcatttattggctttacagattatatttgaaatttgtaactatttttgatgtatctaaaaacatttcacataacaatttcttaagaaaactaagaaaactgttggtatattttttgactaaaatggtttccaaaaagattttgaaacgaactaaaatcttcattacaaaaccaattttaaaactacaaaacaaatattcatggttttaagtttcttttttctttcctagttacgtgggaatacgttattaaattcaggacccatgagaggcgtagggaacaagagcatgtgcatattcatgggtctttcaaattcagtccatcctcttcatgctaatgtgccc

SEQ ID NO: 738 - protein, 228 aa, Arabidopsis thaliana; identical to SEQ ID NO: 484

SEQ ID NO: 739 - protein, 10 aa, Artificial sequence
  Motif 13
  VARIANT (1)..(1): / replace = "Arg" / replace = "Glu" / replace = "Asp"
  VARIANT (2)..(2): / replace = "Glu" / replace = "Asp"
  VARIANT (6)..(6): / replace = "Arg"
  VARIANT (9)..(9): / replace = "Ile"
  VARIANT (10)..(10): / replace = "Gly"
KATELCLGLP

SEQ ID NO: 740 - protein, 7 aa, Artificial sequence
  Motif 14
  VARIANT (5)..(5): / replace = "Ala"
KRGFSET

SEQ ID NO: 741 - protein, 7 aa, Artificial sequence
  Motif 15
  VARIANT (6)..(6): / replace = "Ile"
VGWPPVR

SEQ ID NO: 742 - protein, 13 aa, Artificial sequence
  Motif 16
  VARIANT (8)..(8): / replace = "Ile"
  UNSURE (11)..(11): Xaa can be any amino acid, preferably one of Lys, Thr, Arg, Ser or Gln
  UNSURE (12)..(12): Xaa can be any amino acid, preferably one of Asn, Leu, Thr, Val, Ile or Cys
  VARIANT (13)..(13): / replace = "Phe"
GAPYLRKVDLXXY

SEQ ID NO: 743 - protein, 22 aa, Artificial sequence
  Motif 17
  VARIANT (1)..(1): / replace = "Asn" / replace = "Gly"
  VARIANT (2)..(2): / replace = "Trp" / replace = "Thr"
  VARIANT (3)..(3): / replace = "Asp" / replace = "Gly"
  VARIANT (4)..(4): / replace = "Phe" / replace = "His"
  VARIANT (5)..(5): / replace = "Ala" / replace = "Glu"
  VARIANT (6)..(6): / replace = "Leu" / replace = "Val" / replace = "Ile"
  VARIANT (7)..(7): / replace = "Thr" / replace = "Ala"
  VARIANT (13)..(13): / replace = "Gly"
  VARIANT (15)..(15): / replace = "Leu"
  VARIANT (17)..(17): / replace = "Phe"
  VARIANT (18)..(18): / replace = "Ile"
SSEYVPSYEDKDNDWMLVGDVP

SEQ ID NO: 744 - protein, 13 aa, Artificial sequence
  Motif 18
  VARIANT (1)..(1): / replace = "Thr"
  VARIANT (3)..(3): / replace = "Arg" / replace = "Gln"
  VARIANT (4)..(4): / replace = "Lys"
  VARIANT (5)..(5): / replace = "Ile"
  VARIANT (7)..(7): / replace = "Leu"
  VARIANT (8)..(8): / replace = "Ile"
  VARIANT (10)..(10): / replace = "Ser" / replace = "Glu"
  VARIANT (11)..(11): / replace = "Lys" / replace = "Thr"
  VARIANT (12)..(12): / replace = "Asp"
  VARIANT (13)..(13): / replace = "Thr"
SCKRLRIMKGSEA

SEQ ID NO: 745 - DNA, 56 bp, Artificial sequence
  primer: prm07273
ggggacaagtttgtacaaaaaagcaggcttaaacaatgaaccttaaggagacggag

SEQ ID NO: 746 - DNA, 51 bp, Artificial sequence
  primer: prm07274
ggggaccactttgtacaagaaagctgggttcaatgcatattgtcctctttt

SEQ ID NO: 747 - DNA, 1130 bp, Oryza sativa
catgcggctaatgtagatgctcactgcgctagtagtaaggtactccagtacattatggaatatacaaagctgtaatactcgtatcagcaagagagaggcacacaagttgtagcagtagcacaggattagaaaaacgggacgacaaatagtaatggaaaaacaaaaaaaaacaaggaaacacatggcaatataaatggagaaatcacaagaggaacagaatccgggcaatacgctgcgaaagtactcgtacgtaaaaaaaagaggcgcattcatgtgtggacagcgtgcagcagaagcagggatttgaaaccactcaaatccaccactgcaaaccttcaaacgaggccatggtttgaagcatagaaagcacaggtaagaagcacaacgccctcgctctccaccctcccacccaatcgcgacgcacctcgcggatcggtgacgtggcctcgccccccaaaaatatcccgcggcgtgaagctgacaccccgggcccacccacctgtcacgttggcacatgttggttatggttcccggccgcaccaaaatatcaacgcggcgcggcccaaaatttccaaaatcccgcccaagcccctggcgcgtgccgctcttccacccaggtccctctcgtaatccataatggcgtgtgtaccctcggctggttgtacgtgggcgggttaccctgggggtgtgggtggatgacgggtgggcccggaggaggtccggccccgcgcgtcatcgcggggcggggtgtagcgggtgcgaaaaggaggcgatcggtacgaaaattcaaattaggaggtggggggcggggcccttggagaataagcggaatcgcagatatgcccctgacttggcttggctcctcttcttcttatcccttgtcctcgcaaccccgcttccttctctcctctcctcttctcttctcttctctggtggtgtgggtgtgtccctgtctcccctctccttcctcctctcctttcccctcctctcttcccccctctcacaagagagagagcgccagactctccccaggtgaggtgagaccagtctttttgctcgattcgacgcgcctttcacgccgcctcgcgcggatctgaccgcttccctcggccttctcgcaggattcagcc

SEQ ID NO: 748 - protein, 243 aa, Arabidopsis thaliana; identical to SEQ ID NO: 478

SEQ ID NO: 749 - protein, 210 aa, Arabidopsis thaliana; identical to SEQ ID NO: 480

SEQ ID NO: 750 - protein, 277 aa, Populus trichocarpa
MATATVLGTEMADLNYKETELCLGLPGAVGVKNEVETPNKATGKRGFAETVDLKLNLQAKEGVMDLNENIKNIASKDKNHLPADTIKDPAKPPAKAQVVGWPPVRSYRKNVLAQKNASEEGFRAQVVGWPPLRSYRKNVLTQKNASEEGDKASTGGSSAAFVKVCMDGAPYLRKVDLKMYKSYQELSDALAKMFSSFTMGNYGAQGMIDFMNESKLMDLLNSSEYVPSYEDKDGDWMLVGDVPWEMFVDSCKRLRIMKGSEAIGLAPRAMEKCKSRT

SEQ ID NO: 751 - protein, 248 aa, Populus trichocarpa
MTTSVLGTERTDLNYKETELCLGLPGAVGAKNEVETPNKATGKRGFAETVDLKLNLQAKEGVMDLNENIKNITSKDKNHLPAVTIKDPAKPPAKAQVVGWPPVRSYRKNVMAQKNASEEGEKASTGGSSAAFVKVCMDGAPYLRKVDLKMYRSYQELSDALAKMFSSFTMGNYGAQGMIDFMNESKLMDLLNSSEYVPSYEDKDGDWMLVGDVPWEMFVNSCKRLRIMKGSEAIGLAPRAMEKCKSRT

SEQ ID NO: 752 - protein, 236 aa, Medicago truncatula
MATMGHGLNLKETELCLGLPGGGGGGGGGGSEVETPRASGKRGFSETVDLKLNLQTKEDLNEKSASKEKTLLKDPAKPPAKAQVVGWPPVRSYRKNMMAQKVNNTEDTEKTTSNTTAAAFVKVSMDGAPYLRKVDLTMYKTYKDLSDALAKMFSSFTTGNYGAQGMIDFMNESKLMDLLNSSEYVPTYEDKDGDWMLVGDVPWEMFVGSCKRLRIMKGSEAIGLAPRAMEKCKNRS

SEQ ID NO: 753 - protein, 236 aa, Solanum lycopersicum
MDLKETELCLGLPGGGGGGGELIRDNNNNNNKVNGKRGFSETVDLKLNFHQASDDISCAMENNKMKSSVTTTKEVVCNKDPIKPPAKAQVVGWPPVRSFRKNVMAQKSNTEESEKTTAAFVKVCMDGAPYLRKVDLKMYKSYQELSDALAKMFSSFTNGNYGSQGMIDFMNESKLMDLLNSSEYVPTYEDKDGDWMLVGDVPREMFGDSCKRLRIMKGSEAIGLAPRAMEKCKSRI

SEQ ID NO: 754 - protein, 229 aa, Arabidopsis thaliana; identical to SEQ ID NO: 440

SEQ ID NO: 755 - protein, 67 aa, Oryza sativa
MNESKIADLLNGSEYVPTYEDKDGDWMFVGDVPWEMFVESCKRLRIMKGSEAIGLAPRAMEKCKNRS

SEQ ID NO: 756 - protein, 277 aa, Oryza sativa; identical to SEQ ID NO: 570

SEQ ID NO: 757 - protein, 253 aa, Medicago truncatula
MTNVGDAERDKYSLINFEETELRLGLPGAGDHGESPVKNSCGKRGFSETANVDLKLNLSPINDSASSSSTIASVAENKGKDTTTSATVSPPPRAKAQVVGWPPVRSFRKNIVNVHQKSNSETEVDKSISGGGGNGAFVKVSMDGAPYLRKVDLKLYKSYQELSDALAKMFSSFTIDNCGSQVTKDFMNESKLIDLLNGSDYVPTYEDKDGDWMLVGDVPWEMFVQSCKRLRIMKGSEAIGLAPRAVEKCKNRS

SEQ ID NO: 758 - protein, 236 aa, Arabidopsis thaliana; identical to SEQ ID NO: 468

SEQ ID NO: 759 - protein, 208 aa, Solanum lycopersicum
MSSNKLDFEETELRLGLPGGARKNVYGDNDTCNVNGKRGFVDLKLNLSSDINNIKNSTHKTPAAKAQVVGWPPVRSFRKNILTSQKLDRENDNILVKVSMDGAPYLRKVDLNMYKSYQELFDALTKMFNSFTIVQGMKDFMHEGKLMDLLNSSDYVPTYEDKDGDWMLVGDVPWGMFVDSCKRLRIMKGTEAIGLAPRAMEKCKNRNG

SEQ ID NO: 760 - protein, 299 aa, Medicago truncatula
MEVVGMKKENMGFEETELRLGIGFLGNNGSATATEGVVRKRGFSETETDDDTTTMDLMLNLSSKEATAEVDPSDITTKTLQKEKTLLPADPAKPPAKAQVVGWPPVRSYRKNMLAMQKSESEKNSSSNFNAITFVKVSMDGAPYLRKVDLKMYTSYSQLSDSLGKMFSSFTIGNCESQGMKDFMNESKLMDLLNNSDYVPTYEDKDGDWMLVGDVPWEMFVESCKRLRIMKGKEAIGYSTKSYGKMQEQELDLLVALVRHLLHLLSYFGTCRMFSIVNLCNVIWFLFFDKIVIWFVIHI

SEQ ID NO: 761 - protein, 245 aa, Medicago truncatula
MEVVAGMKKEEKMVFDETELRLGLGLPGKTTEVVRKRGFSETESESETNTVDLKLNLSTKEGATDPQFKPKEKALLLSDSGAKPPAKAQVVGWPPVRSFRKNMFAAQKSNEGSEESEKKNSNNNPISFVKVSMDGAPYLRKVDLKMYKSYPELSDALAKMFNSFTTGNCESQGIKDFMNESNKLMDLLNSSDYVPTYEDKDGDWMLVGDVPWEMFIDSCKRLRIMKGKEAIGLAPRAMEKCKNRS

SEQ ID NO: 762 - protein, 237 aa, Populus trichocarpa
MEVEKGTKMGFEETELRLGLPGNGGGAEGEMVRKRGFSETVDLKLKLSSKESGADPNHEKTSSLQREKNLLATDPAKPPAKAQVVGWPPVRSFRKNMLAVQKSSTDQECEKVPGGNATFVKVSMDGAPYLRKVDLKMYKTYQELSDALGKMFSSFTIGNCGSHGLKDFLNESKLIDLLNGTDYVPTYEDKDGDWMLVGDVPWDMFVESCKRLRIMKGTEATGLAPRAMEKCKNRSYK

SEQ ID NO: 763 - protein, 174 aa, Arabidopsis thaliana; identical to SEQ ID NO: 476

SEQ ID NO: 764 - protein, 168 aa, Arabidopsis thaliana; identical to SEQ ID NO: 486

SEQ ID NO: 765 - protein, 189 aa, Arabidopsis thaliana; identical to SEQ ID NO: 438

SEQ ID NO: 766 - protein, 190 aa, Solanum lycopersicum
MECVLAHEKDLNLKATELRLGLPGRTDEESDKEIVFHFKNNKRALPEDEDCESNSISDPKTPPVAKTQIVGWPPVRANRKNSFPSKKAEAECGMYVKVSMDGAPYLRKIDLKLYKGYPELLKALEKMFKLSIGEYSEREGYKGSEFAPAYEDKDGDLMLVGDVPFEMFLSSCKRLRIMKGSEARGLGCGV

SEQ ID NO: 767 - protein, 196 aa, Solanum lycopersicum
MTSIVGNQKDLNFKATELRLGLPGTEDQESDQEISNSKNNNKRALPESTHDEEDCESKSSSDHVKTPPPVAKAQIVGWPPVRSNRKNIIQPKKTESESGMYVKVSMDGAPYLRKIDLKMYKCYQELLKALENMFKLTIGEYSEREGYKGSEFAPAYEDKDGDLMLVGDVPWEMFMSSCKRLRIMKGSETRGLGCGV

SEQ ID NO: 768 - protein, 192 aa, Populus trichocarpa
MEGGVAYENDLNLKATELRLGLPGTSCTNEEQAVSGARNNKRPLPETREERGAKGKSDPRHDDQETAPAPKAQIVGWPPIRSYRKNTLQPKKAEAEAAAGMYVKVSMDGAPYLRKIDLKVYKGYPELLKALENMFKLTIGEYSEREGYKGSEYAPTYEDKDGDWMLIGDVPWDMFLSSCKKLRIIKGSEATG

SEQ ID NO: 769 - protein, 207 aa, Populus trichocarpa
MEGGVAYENDLNLKETELRLGLPGTGCTNEKGVSGARNNKRPFPETREEGGANGKSDAQHDDQETASAPNTYSFDMHATCRVQIVGWPPIRSYRKNSLQPKKAEDEAAAGMYVKVSMDGAPYLRKIDLKVYKGYPELLKALENMFKLTIGEYSEREGYKGSEYAPTYEDKDGDWMLVGDVPWDMFLSSCKKLRIMKGSEAIGLGCGA

SEQ ID NO: 770 - protein, 195 aa, Populus trichocarpa
MAYESDLNLKATELRLGLPGSDEPEKPSTTPSVRSNKRASPEISEESRSKGSSSVSSNVENGERDSAPPAKAQVVGWPPIRSYRKNCLQPKKNDQVDGAGMYVKVSVDGAPYLRKIDLKVYKSYPELLKALENMFKLTIGEYSENEGYNGSEFAPTYEDKDGDWMLVGDVPWDMFISSCKRLRIMKGSEARGLGC

SEQ ID NO: 771 - protein, 199 aa, Populus trichocarpa
MERSMAYERHLNLKATELRLGLPGSDEPEKPSTTPSVRSNKRASPEISEESRSKGSSSLSSNVENSEGDDAPPAKAQVVGWPPIRSYRKNCLQPKKNDRVDGAGMYVKVSVDGAPYLRKIDLKVYRSYPELLKALEDMFKLTIGEYSEKEGYNGSDFAPTYEDKDGDWMLVGDVPWDMFISTCKRLRIMKGSEARGLGC

SEQ ID NO: 772 - protein, 178 aa, Medicago truncatula
MENKVAYENDLNMKATELRLGLPGTEQNEEQKAKISNKRPLTETSKDSGSKTSDDAAPPSKAKIVGWPPIRSYRKNSLQEAEASGIYVKVSLDGAPYLRKIDLRVYGGYAQLLKALESMFKLTIGNYSEKEGYKGSEYEPTYEDKDGDWMLVGDVPWEMFVTSCKRLRIMKGTEARGV

SEQ ID NO: 773 - protein, 186 aa, Medicago truncatula
MEFKATELRLGLPGTDEKDMKTIHGSVVKNNKRQLPQTSEESVSISKVSNDDQHVESSSAAPPAKAKIVGWPPIRSYRKNTLQEAEVGGIYVKVSMDGAPYLRKIDLRIYGGYPELLKALETMFKLTIGEYSEREGYKGSEYAPTYEDKDGDWMLVGDVPWDMFVTSCKRLRIMKGTEARGLGCGV

SEQ ID NO: 774 - protein, 203 aa, Populus trichocarpa
MEFERDLNLDATELRLGLPGTATKQSEKQTPNSNLAKSNKRSLPDMNEEPAGSSRENSSTVSSNDKKSHDQETAPPIKAQVVGWPPIRSYRKNCLQAKKLEAEAAGLYVKVSMDGAPYLRKIDLKVYKGYPELLKALEEMFKSKVGEYSEREGYNGSEHVPTYEDKDGDWMLVGDVPWDMFINSCKRLRIMKESEARGLGCAV

SEQ ID NO: 775 - protein, 201 aa, Populus trichocarpa
MEFERDLNLEATELRLGLPGTATEQLEKQTPNSNVTKSNKRSLPDMNEDSAGRRESSSVSSNDKKSHEQETAPPTKTQVVGWPPIRSYRKNCLQARKLEAEAAGLYVKVSMDGAPYLRKIDLKVYKGYPELLEVVEEMFKFKVGEYSEREGYNGSEYVPTYEDKDGDWMLVGDVPWEMFINSCKRLRIMKESEARGLGCAV

SEQ ID NO: 776 - protein, 204 aa, Medicago truncatula
MENSLGNHQTEMNLKATELRLGLPGSDEVEKLPCNFSVLRNNKRSSPEEASDVDSISKSKLNSSNGSSHTTNDDQDNAPPSKAQVVGWPPIRSYRKNSLQQKKGEEVGMYLKVSMAGAPYLRKIDLKVYKSYSELLKVLENMFKCTIGEYSEREGYNGSEFVPTYEDKDGDWMLVGDVPWEMFMSSCKRLRIMKGSEAKGLGCF

SEQ ID NO: 777 - protein, 185 aa, Solanum lycopersicum
MRIYEKDINDLEATELRLGLPGIINDESSTSTSTSKNSRKRPSSSSVNENEQQDSAPAPKAQVVGWPPVRSYRKNHVSKLSESDNNSSGMYLKVSMDGAPYLRKIDLQVYKSYQELLKALQSMFKCTIGVYSEREGYNGSDYAPTYEDKDGDWMLVGDVPWEMFISSCKRLRIIKGSEAKGLACL

SEQ ID NO: 778 - protein, 305 aa, Arabidopsis thaliana; identical to SEQ ID NO: 490

SEQ ID NO: 779 - protein, 132 aa, Medicago truncatula
MMKLRENQNFDCLYVKVSMDGAPYLRKVDLKTYNNYMELSSALEKMFTCFTIGQCNSPGLPGKDGLSESSLRDLLHGSEYVLTYEDKDGDWMLVGDVPWGMFADSCRRLRIMKGSDAIGLAPRAMEKSRSQN

SEQ ID NO: 780 - protein, 349 aa, Populus trichocarpa
MSSIPKEHDYIGLSETPSMEKISDKLSSSSSTLSTEENINSNSNSNSNSTNTSLNLKETELRLGLPGYQSPERKLTLPAAGVSLFGKDIDTNNTNGYPLRPLKNLVSGTKRGFSDAIVGSSGKWVFSGSNGSEVDLGKGAILFSPRGDNGNSQKSCVAGPAKKDDVAQSPKPVQEKISQVAAANENSSAPAAKAQVVGWPPIRSFRKNTMASSLVKNNEDVEGKSGYGCLYVKVSMDGAPYLRKVDLKTYSNYLELSSALEKMFSCFTIGQCGSHGLRGQDGLTESRLKDILHGSEYVLTYEDKDGDWMLVGDVPWDMFTNSCRRLRIMKGSEAIGLAPRAMEKCKNRN

SEQ ID NO: 781 - protein, 307 aa, Populus trichocarpa
MSMPLEHDYIGISSEVSSMENTSGTDTINISTTASKGLNLKATELRLGLPGSDSPERGNENQQLGFSLNNNNSKDKSFVSGARRGFSVAIHGGSANWVFSGNAGSDPNFSLRGANSGKEGFPHSSKPVVQENKSQVDGANTNGHGAAPASKAQVVGWPPIRSFRKNTMASHLSKNDDGAEVKSGSGCLYVKVSMDGAPYLRKVDLKTFGSYMELSSALEKMFSCFTIGQCGSHVVPGQDGLSESRLMDLLHGSEYVLTYEDKDNDWMLVGDVPWKMFTDSCRRLRIMKGSEAIGLAPRAMEKCKSRN

SEQ ID NO: 782 - protein, 347 aa, Medicago truncatula
MSLPRLGIGDEESKSNVTLLEKSLHLNGSKPKEFNYMGLPSSNCSSVDSSVPKIQSFKDETKSNLNLKATELRLGLPGSLSPERDSSDFCLRSSKQFDEKPLFPLHPQKDDHLFESKPAVLGNKRGFSDAMNVFSEGKLKPSSKMLENVAGQKVKADEIATVKIGLERPNGVGESKPGLNGSANNGNSTAPASKAQVVGWPPIRSFRKNSLTTASKNTEEVDGKLGSGGAVFVKVSMDGAPYLRKVDLKNYTAYSELSSSLEKMFSCFTIGQCESHGNQMLNETKLRDLLHGSEYVITYEDKDGDWMLVGDVPWEMFIDTCRRLRIMKSSDAIGLAPRAVEKSKSRN

SEQ ID NO: 783 - DNA, 1258 bp, Arabidopsis thaliana
tatattattattgccccttcctctcctttcttcttcccctcttaccttttcagagagagaaacaatatttctaatctattacaagtaacatgatcggccaacttatgaacctcaaggccacggagctctgtctcggcctccccggcggcgctgaagcagttgagagtcctgccaaatcggcggtgggaagcaagagaggcttctccgaaaccgttgatctcatgctcaatcttcaatctaacaaagaaggctccgttgatctcaaaaacgtttctgctgttcccaaggagaagactacccttaaagatccttctaagcctcctgctaaagcacaagtggtgggatggccacctgtgaggaactacaggaagaacatgatgactcagcagaagaccagtagtggtgcggaggaggccagcagtgagaaggccgggaactttggtggaggagcagccggagccggcttggtgaaggtctccatggacggtgctccatatctgaggaaagttgacctcaagatgtacaaaagctaccaggatctttctgatgcattggccaaaatgttcagctcctttactatgggaaactatggagcacaaggaatgatagatttcatgaacgagagcaagctaatgaatctgctgaatagctctgagtatgtgccaagctacgaggacaaagatggtgactggatgctcgttggcgatgtcccatgggaaatgtttgtcgagtcttgcaaacgtttgcgcattatgaagggatctgaagcagttggacttgctccgagagcaatggagaagtactgcaagaacagatcttgaattaataataaaaaaaaagaagcatcaatgatcaacaatatgacgggttcttgattttatatgtatttttatgattgtatgtggctatcacctatatatgtgtgttgtaattttaaatacttgatgggtatatagggcagtattttaccagtaagatgtggacaaacttgtaatgtgaccaaaagagaggaaacttcaatatctctgtgtttgtgtcatatttattgcccaacatgtgtctgtcggtttgatgatcaatcacaacttgatatgtgcatacatataaatgtgtgtatgtaggtgtgtgtacatgtacatgtgttttgatccctactctgctacttgtcgtttcttgtgtgtgttatctaatagttttttcccaaaatgaataattcgttgttatgtttactattttaccaataaaatcttagcttttt

SEQ ID NO: 784 - DNA, 990 bp, Arabidopsis thaliana
cttcccctcttaccttttcagagagagaaacaatatttctaatctattacaagtaacatgatcggccaacttatgaacctcaaggccacggagctctgtctcggcctccccggcggcgctgaagcagttgagagtcctgccaaatcggcggtgggaagcaagagaggcttctccgaaaccgttgatctcatgctcaatcttcaatctaacaaagaaggctccgttgatctcaaaaacgtttctgctgttcccaaggagaagactacccttaaagatccttctaagcctcctgctaaagcacaagtggtgggatggccacctgtgaggaactacaggaagaacatgatgactcagcagaagaccagtagtggtgcggaggaggccagcagtgagaaggccgggaactttggtggaggagcagccggagccggcttggtgaaggtctccatggacggtgctccatatctgaggaaagttgacctcaagatgtacaaaagctaccaggatctttctgatgcattggccaaaatgttcagctcctttactatgggaaactatggagcacaaggaatgatagatttcatgaacgagagcaagctaatgaatctgctgaatagctctgagtatgtgccaagctacgaggacaaagatggtgactggatgctcgttggcgatgtcccatgggagtgagtcaaatttaatcgtttcatatacttttttttataacttataacttgactcgttaaccacatttcccgaaattggtagagacaaagccaaagatattcaacatccatgtgttataaatacgtacaaccatgcattggttggcaagagacaagaggatctttcaaaaattatacaatagtatcgatatgtttagagctcattcgtagctggcacatcatcatattattgccaaaaaccttagaataaactttaaatgttaacgactcatattctaatgttctaaccgtaaacttgaatacc

SEQ ID NO: 785 - DNA, 1266 bp, Populus trichocarpa
gaagcccaacttatattattgaggtctctctctctctctctctctctcagctagcttgcaaaacatagaagaggacacaagaaataagaaacaaagaaacgagcaaaagctagctatcagcaacaccaaaagcaacaagcaataatacaaaacatatcagatcttccactaaaaccattcattggcgcgcgcgtggcagagagaaatggcaacagctaccgtgttaggtaccgagatggcagatttgaactacaaagagactgagctgtgtctaggattgcctggtgctgttggtgtcaaaaatgaagttgagacacctaataaggctactgggaaaagagggtttgctgagactgttgatttgaagcttaatcttcaggctaaagaaggtgtcatggatctgaatgagaatatcaagaatattgcttcaaaggacaagaaccaccttcctgctgataccatcaaggaccctgctaagccaccagccaaggcacaagttgtaggttggccaccagttagatcttacaggaagaacgttttggctcagaagaacgccagtgaggaaggtttcagggcacaagttgtaggttggccaccacttagatcttacaggaagaacgttttgactcagaagaacgccagtgaggaaggtgataaggcaagcactggcggaagcagtgcagcatttgtgaaggtttgcatggatggtgcaccctatcttcgcaaggtggacttgaagatgtacaagagctaccaagaattatctgatgccttggccaaaatgttcagttccttcaccatgggtaattatggagcccaaggaatgatagactttatgaatgaaagcaagctgatggatctacttaacagttccgagtatgtgccatcctatgaagacaaggatggtgattggatgcttgtgggtgatgttccatgggagatgtttgttgattcatgcaagcgcctgcgcataatgaaaggatctgaagccattggacttgcaccaagagcaatggagaaatgcaagagcagaacctgaatcttatgtactcaatagacaaggcacttgcgcaacatggatggatcagtagtggtgtttctttggatgtgcatgtctttactcttttttttttttttttattaatattgctgctgttatttcttaagaaatgtgtctgtattttcatttgatcgtatatagatatcaaagatctagacatttgtaatggacaagaagcaaaaaacttaacccccgattggctggct

SEQ ID NO: 786 - DNA, 1273 bp, Populus trichocarpa
ctagctagttagcttgcaaaacaaagaagaggacacgggaaatcagaagcaaggagctagctatctacagcaccaaaaacaacaagcaataatacaaaacacgttagatcttccactaaagccattcattggcgagcgcgcggtagagagaaatgacaacttctgtgctaggtaccgagcgaactgatttgaactacaaagagactgagctgtgtctgggattgcctggtgctgttggtgccaagaatgaagttgagacacctaataaggctactgggaaaagagggtttgctgagactgttgacttgaagcttaatcttcaggctaaagagggtgtcatggatctgaatgagaatatcaagaatattacttcaaaggacaagaaccaccttcctgctgttaccatcaaggaccctgctaagccaccggccaaggcacaagttgtaggttggccaccagttcgatcttacaggaagaacgttatggctcagaagaacgccagtgaggaaggcgagaaggcaagcactggcggcagcagtgcagcatttgtgaaggtctgcatggatggtgcaccctatcttcgcaaggtggacttgaagatgtacaggagctaccaagaattatctgatgccttggccaaaatgttcagttccttcaccatgggtaattatggagcccagggaatgatagactttatgaatgagagcaagttgatggatctacttaatagttccgagtatgtgccatcctacgaagacaaggatggtgattggatgctcgtgggtgatgttccatgggagatgtttgtcaattcatgcaagcgcctgcgcatcatgaaaggatctgaagccattggacttgcaccaagagccatggagaaatgcaagagcagaacctgaaccttgtatactcaatttatttagcttccctactgaactccctcttttcagccttgtatccatgaagaccaggagacaaggcacttgtgcaacgtgggtggagcagtagtggtgtttcctggatctgtctgtactttttttttttattattatttttgaggagatgtgtctgtattttcgtttgatcgtatatagatatcaaagatctagacatttgtaatggacaagaagcaagaacttaaccccctgttgtctggcttgtttattactaatggcttgcgtaataatttacctatttctctgttgtttgttgttgtattggctgccatagttgccgagtacgtacgtgttttattccttcaattcaatgctac

SEQ ID NO: 787 - DNA, 1195 bp, Medicago truncatula
cggccgggggaggacacacccttaaggagaaacatcatacacattttcagtttcatagagagaaaaaaaagtaaaaagagtcaatattatatcttttcaattatattctacaatcttcttattcttctaagctttgtatttcattgagaagctagccaaaaagaatatggctactatggggcatggtttgaacctgaaggagactgagctttgtctgggtctgcctggtggtggcggcggcggcggtggaggtggctctgaggtggaaactccaagggcttctggaaagagaggtttctctgagacagttgatctgaagcttaatcttcaaaccaaggaagatctgaatgagaagagtgcttcaaaggagaagaccctccttaaggaccctgctaagccaccagctaaggctcaagtagttggttggccaccagtgaggtcatacaggaagaacatgatggcacaaaaggttaacaatactgaggacactgagaagacaacaagtaacactactgctgctgcttttgttaaggtttccatggatggagcaccttaccttcgtaaggttgacttgacaatgtacaaaacctacaaagatttatctgatgccttagccaaaatgttcagctccttcaccactggtaactatggggcccaaggaatgatagacttcatgaatgagagcaagttgatggatcttcttaacagctctgagtatgtgccaacctatgaagataaggatggcgactggatgctcgtgggagatgtcccatgggagatgtttgttggatcatgcaagcgtcttcgcataatgaaaggatcagaagctattggacttgcaccaagagcaatggagaaatgcaaaaaccgaagctgaatttggtctaaatacatatcatatcctcctatatcgaagtcccgtaccaaagtggacctatatgaaaagatatatgaagcactacctgtggattggagtgttagtttggatgtgtcttcactgtttttgttttgttcgtatatagattcaaactttaattttaagtatttgtaatcgacaagaagcaataaacttaaccacctatatactattgtagtttgccttgtttaattattattattatgtgattgcttccatgctgtcatgtttgttgtgtgctatatatatattattatatactttgaattttaatgcata

SEQ ID NO: 788 - DNA, 1084 bp, Solanum lycopersicum
tgaaaacttttgttactattaactatacttatattatttttgcattttctctctcaatatttttctctctctctctctataatatttgcattgtactactactactacatattgaagaaaaaagagtttgatttttgatggatttgaaagaaactgagttgtgtttgggactacctggtggtggtggtggcggaggtgaattaattcgcgataataataataataataacaaggttaatgggaaaagagggttttctgagactgttgatttgaagctcaattttcatcaagctagtgatgatatttcttgtgctatggagaataataagatgaagagcagtgttactactactaaagaagttgtttgtaacaaagatccaatcaagccacctgccaaggcacaagttgtgggttggccaccagtgagatcatttaggaagaatgtaatggctcaaaagagcaacactgaagaaagtgagaagactactgctgcatttgtcaaagtttgcatggatggtgcaccttacctacgtaaggttgatttgaaaatgtacaaaagttaccaagaactttctgatgctttggctaagatgtttagctcctttactaatggaaattatgggtcccaaggaatgatagattttatgaatgagagcaaattgatggatctccttaacagttctgaatatgtaccaacctatgaagataaagatggagattggatgcttgttggagatgtacctcgggagatgtttggtgattcatgcaagcgtttacgcataatgaaaggatcagaagctattggacttgcaccaagagctatggagaaatgcaagagcaggatctaaggcaattgatggtgtgcaagctccatagataatgcttgaagttgaaggttttgtgagattaatatattgttgttttcatgtgcttgtatttttaattttaattagtatatagttattaattaaagaagtggtctttaatttggacaatatttgtaatgaacatgatgcaataaacttaaaaccctctattgtgtctggcttgcttattacttaattaaaattaatggtttgattaa

SEQ ID NO: 789 - DNA, 1087 bp, Arabidopsis thaliana
agacagagatataatacagactcatctcactttgtattatttgagtgtttttataaaaccatttttccatcttcctcatcaccttcccaagaagaagaacaccaaagaagaagaaaggttaataatgatgggcagtgtcgagctgaatctgagggagactgagctgtgtcttggtcttcccggtggagatacagtggctccggtaaccggaaacaagagagggttctcagagacggttgatctgaagctaaatctgaataatgagcctgcaaacaaggaaggatctacgactcatgacgtcgtgacttttgattccaaggagaagagtgcttgtcctaaagatccagccaaacctccggccaaggcacaagttgtgggatggccaccggtgagatcataccggaagaacgtgatggtttcctgccaaaaatcaagcggtggcccggaggcggcggcgttcgtgaaggtatcaatggacggagcaccgtacttgaggaaaatcgatttgaggatgtataaaagctacgatgagctttctaatgctttgtccaacatgttcagctcttttaccatgggcaaacatggaggagaagaaggaatgatagacttcatgaatgagaggaaattgatggatttggtgaatagctgggactatgttccctcttatgaagacaaagacggtgattggatgctcgtcggcgacgttccttggccaatgttcgtcgatacatgcaagcgtttacgtctcatgaaaggatcggatgccattggtctcgctccgagggcgatggagaagtgcaagagcagagcttgaagtcaaattaaaaggataagtggtatcgattatatatttgattaacacattgattggtgttaattgctcttttttttcttacgatgaaatacattgttcagtttcttttgattgtctgtgttttgatctggatttggtatgtagatatagtttgtatgctattatgtgtaatgaacttaagttaaatatttgagacatttgtaatggaaaatgtgtaataatttgaacatcctattcctatgtatatgtttgtctttatttatttattttgcc

SEQ ID NO: 790 - DNA, 670 bp, Oryza sativa
cggcatgaacgagagcaagattgctgatctgctcaacggctctgaatatgtgccaacctacgaggacaaggacggcgactggatgttcgtcggcgacgtcccatgggagatgtttgttgaatcatgcaagcgccttaggataatgaaaggatcagaagctattggccttgcaccgagggcaatggagaaatgcaagaacagaagctgagaaagaagaacatgtcgccatcaaaaacggatggatcatcatcagatgcaccaatctatctatagctttttttaattgcagctttgcctcatccctgtatcatactggcttgctgtcttcatctccaagtctgtacctttcctgatcagtgaaagtcattttggtgtggtggtcagtttttgttctgttgcagtcattaagttcctaagtgtgtcattttgtcttatacataagaaagaagccaagaacatgtcccagtagtgcctgtcccataattatgtattttttgctctccctgttcttccctttctctctgttttttttttcccttaatggcacaaaatgtaaagtctccctgttcaaaggggcctcaatgtattttgtccaggaaaaggtcgtttaattatatttcatggtgtatccatcaaacaaaaagttattcatgcaagggtgttatgtgtt

SEQ ID NO: 791 - DNA, 1721 bp, Oryza sativa
  misc_feature (1708)..(1708): n is a, c, g, or t
tgaggaatcggcacgaggatattatcatttcttggccccccaacatcacctctcccttctcctctttatctatggccatgtggcatttccatttcactcctttacatcacatttctagccaccctctcatcatcaccatcaagctcaaaccaacaagaagagagctagcttttggtactattagccactagtagatagccaagaagaaaccaagaaattctttgagctatctaattagctaggtccattgattcatcatcatctccattgatccacttagctttgaagaagaagaagaagaagacatttagttagctagctatattgaggtgaggtggcggcggcaatggcggcggacctggccttcgaggcgaccgagctccggctcggcctgcccggcggcggcggtgatggagacgccgcggcggcggcggcgaggagctcctccgggaagaggggcttcgccgagaccatcgacctcaagctgaagctggagccggcggccgcggcggtggacgacgacgacgacaaggaggaggcggcggctgacgaccgggagaagaaggtcgacatcgtcggagctgacaacgacgacgcctcgccgccggccgccgccgccgccggcgggatgaagcggtcgccgagccagagcagcgtcgtcaccgccgccgccgaccccgagaagccaagggctcccaaggcacaggtggttgggtggccgccggtccggtcataccggaagaacatcctggccgtgcaggccgacaagggcaaggacgccgccgacggcggcggcgacaagtccggcgccggcgccgccgccgccgccttcgtgaaggtgagcatggacggcgcgccatacctgcgcaaggtggacctcaagatgtacaagagctaccttgagctctccaaggcactcgagaagatgttcagctccttcaccattggaaactgtgggtctcatggggtgaacggcatgaacgagagcaagattgctgatctgctcaacggctctgaatatgtgccaacctacgaggacaaggacggcgactggatgctcgtcggcgacgtcccatgggagatgtttgttgaatcatgcaagcgccttaggataatgaaaggatcagaagctattggccttgcaccgagggcaatggagaaatgcaagaacagaagctgagaaagaagaacatgtcgccatcaaaaacggatggatcatcatcagatgcaacaatctatctatagcttttcttaattgcagctttgcctcatccctgtatcatactcgcttgctgtcctcatctccaagtctgtacctttcctgatcagtgaaagtcattttggtgttgtggtcagtttctgttctgttgcagtcattaagttcctaagtgtgtcatcttgtcttatacataagaaagaagccaagaacatgtaccagtagtacctgtcccataattatgtcttttttgctctccctgttcttccctttctctctgttttttttttaccttaatggcacaaaatgtaaaggcaccctgctcaaagggacctcaatgtattttgtccatgaaaaggttgtttaattatcttcatggtgtatccatcaaacaaataattattactgcaaggtgttatgtgttaattaattgtattgtatgaggatggtgtctgctctgctccctgccttcttttaatcaattgattaatnccccattacattg

SEQ ID NO: 792 - DNA, 1706 bp, Medicago truncatula
cggccggggatatcaccaaaaccatcttctaaacgcacaaaaaaactcttcgcaaattctcacatatttctctttcatctttcaccaaaaaaagaaaaagaaaaacattcttctgtgtagcaagaaaagagaaaatgactaacgttggggatgcagagagagacaagtacagcttgataaattttgaggagaccgagttacgactcggtcttccaggtgcaggtgatcacggagaatcacctgttaaaaatagttgtggaaagagaggtttctcagaaactgctaatgttgatttgaagcttaatctttctcctataaatgattctgcttcatcttcttcaactatagcttctgtagctgaaaacaaaggcaaagacacaacaacttctgctactgtttctcctcctcctcgtgctaaggcacaagttgtgggatggccaccagttagatcctttagaaagaacatagtaaatgttcatcaaaagagcaatagtgaaacagaagtagataagagcataagtggtggtggtgggaatggagcatttgttaaggtgagtatggatggtgcaccatatctacgtaaggtggaccttaaattgtacaagagttaccaagagctgtcagatgcgctggctaaaatgtttagttccttcacaattgacaattgtgggtcccaagttaccaaagacttcatgaatgaaagcaaattgattgaccttttgaacggttctgattatgtaccaacatatgaagacaaagatggtgattggatgcttgttggtgatgttccttgggaaatgttcgttcaatcgtgcaagcgtcttcgcataatgaaaggttctgaggcaattgggctagcgccaagggcagtggaaaaatgcaagaacagaagctgaaatccttgttgtgttccgacaaaaatccacttctggttgataaatctgcatcccaaggaagcaagttggctcgagtaaggtcgaggctaatataggaataagagttctcgattatattattattgctatgtgtctgctatttcttttgtatttttttctctcttaatatgtgtattatatatgaatgagaaattaggtggaaattcattagggacaagaaataatatagaagatgtttatatgacccagtttttgttttataaggggaaaaaaaatatgactctgtctattgccagcgtgtgcttgacttataataatgcaaatgtttccagttatcattgctggatttgtccccccattatttgtattttgtacagtatgtgacagagtatgtgcatacatacctaccttatacgtatcatatttattgtgtaatgtatatagttttgtgaatgatatgcaagatcctttgtaatattaggtacacaacatgcacttgtctgtcaagttgtaaatggagctgatttgttgaggtgtgattgcctctagatccgtgaacatggtggacccataccatgtgcttgttgttacggccttcaatggagggatccactactttatttcacatgttccctcttattcttattttgtgattaatatttattgttgatggctcactttctaagatggagtggatggctatcctaaagaattattggtggtgggaatataagatttttttttttttttggtcctgttaacgaatatttttaagcttaaatatgtaaatcgtttctataagtttgcgtg

SEQ ID NO: 793 - DNA, 1279 bp, Arabidopsis thaliana
atttagccctttgtttctctacacacatctcacatccccctatctctctctctcttcaaacgttttagttccccaaaaaaatatcaaaagaactaaaagaaaaaccctagaagccgaagaatctcctactcgttgtcgatcggatcacctaactaattactcgttgataatcattatatcgagaaatatgattaattttgaggccacggagctgagattagggctaccgggtgggaatcacggaggagaaatggctggaaaaaataatggtaaaagaggattttctgagactgttgatctcaaactgaatctttcatcgacggctatggattcagtttccaaagtcgatttagagaatatgaaggagaaggtcgtaaaaccaccagccaaggcacaagttgtgggatggccaccggtacgatctttccgcaagaacgtcatgtccggccaaaaaccgaccaccggagatgccaccgaaggaaacgataagacttctggcagcagtggagccacctcatccgcctccgcatgtgccaccgtggcttatgtgaaggttagcatggacggtgcaccgtacctacggaaaattgacttgaaactctacaaaacttaccaagatctctccaacgccttaagcaaaatgtttagctcttttaccataggcaactatggaccacaaggaatgaaagatttcatgaatgagagtaaattgatcgatcttctaaacggatcagattatgttccaacatatgaagataaagatggcgactggatgcttgtaggagacgtaccgtgggagatgtttgttgattcatgcaaacgtatacgaataatgaagggatcagaagcaatcggacttgctccaagggcattagaaaagtgcaagaacagaagttgagttctcgacgacatttcgtgttcttacctaaaaaaggaagaaagcctgtttcgatcggttggatatctcgaaccgagaaagctaaaccggctcgaaactattgttccgagcaaggagtttgcttataatattaattaataataatattaatattgtggtgtattacattttaaaaaattaaatcgtttttgttatatgtattatatacatatattaatatgtatatttaattaggttgcatctatttccgttaaaaccaacttttgtttttacgcattatcgtgttgtctatatggtctgtgtccgtaaggcatcttaatgtgttactttgacgtaccaaattattacttacattatttcatttctcaacaatcttttttt

SEQ ID NO: 794 - DNA, 891 bp, Solanum lycopersicum
taaaaaaaataacaaaaaatgagtagtaataagttggattttgaggagacagaattaaggctagggttgcctggtggagcaagaaaaaatgtttatggtgataatgatacttgtaatgttaatggtaaaagaggctttgtagatttgaagcttaatctttcttctgatattaacaacatcaagaattcaacacacaaaaccccagctgccaaggcacaagttgtgggttggccgcccgtaaggtcctttcgaaagaatattttgacttctcaaaagcttgatcgagagaatgataatattttggtgaaggtgagcatggatggtgcaccttaccttaggaaagtggacttaaacatgtacaagagttatcaagaattatttgatgccttaaccaagatgttcaattccttcactattgtccaaggaatgaaagatttcatgcatgaggggaaactgatggaccttttgaatagttctgattatgttcctacctatgaagacaaagatggtgattggatgcttgttggagatgtcccatgggggatgtttgttgattcttgcaaacgcttgcgcatcatgaaaggaactgaagcaataggactagcaccaagggctatggagaagtgcaagaacagaaatggatgaaatcaacgttaacctttttaaatgaatttcatcaatcaaaatttcatcgattatagtaaatgtttattcgaattgaatagtgtgttatgtattaatgctgctattataaagtgcttgtatgtattaataatgagtgtagcatatttatttctgtaaatgtaatttatttagtgctataatatttcttatttaatacaactcgataaatcgtttgtctaataataatttagtttaagttgcttaaaa

SEQ ID NO: 795 - DNA, 1095 bp, Medicago truncatula
atttccacatagcaaacaaattattcacttgaattgttagagagagaaaaagtgttatatataattaagagagtgaaaaactcatcatggaagttgttggtatgaagaaggagaatatgggatttgaggaaactgagttgagacttggaattggatttcttggaaataatggatcagccacagctactgaaggagttgtaaggaagagaggattttctgagactgaaactgatgatgatacaactactatggatttgatgcttaatctttcctctaaggaagctactgctgaggtagatccaagtgatataaccaccaagactttgcaaaaggagaagacccttttgcctgcagatcctgccaagcctcctgcaaaggctcaagtggtgggttggccacctgtccggtcgtaccggaagaacatgttagcaatgcaaaagagtgaaagtgagaagaacagcagttccaatttcaatgcaattacatttgtgaaagttagtatggatggagctccttaccttcgtaaggttgacttgaagatgtacacaagttactcacagctttctgattccttaggcaaaatgttcagctccttcaccattggcaactgtgaatctcaaggaatgaaggatttcatgaatgagagtaagttgatggatcttttaaacaattctgattatgttccaacctatgaagacaaggatggtgactggatgcttgtcggtgacgtcccatgggagatgtttgttgaatcatgcaaacgtttgcgtatcatgaaaggaaaggaggctattgggtatagcaccaagagctatggaaaaatgcaagaacaggagctagacttgctggtcgcacttgttcgccacctgctccatcttttgtcatattttggtacctgcaggatgttcagtatagttaatttgtgtaatgttatatggtttttattttttgataaaattgttatatggtttgttatacatatataatgtttgaaacaaaatacaatgagagtcttaagtgctgattactttaaacagaaacaataaacgactcccaaattatgttgttagatttggctttcttatatattatcta

SEQ ID NO: 796 - DNA, 1157 bp, Medicago truncatula
caacgtgctcttgcctttctttctatataccccttcctctattattgtcacaaaccaatcaaatcacactgaatgcttagagagagaaagaaaaatttagagagagaaaaaacttgataatggaagttgttgcagggatgaaaaaggaggaaaagatggtgtttgatgaaactgaactgaggttaggacttggattgccagggaaaacaacagaagtagtaaggaagagaggtttttctgaaactgagagtgaaagtgaaacaaacactgtggatttgaagcttaatctttctactaaggaaggagcaacagatccacaatttaagccaaaggagaaggctcttctgctctctgattctggtgccaagcctcctgctaaggcacaagtggtagggtggccaccagtgcggtcattccgtaagaacatgtttgctgcccaaaagagcaatgaaggatcagaagaaagtgaaaagaagaatagcaataataatccaataagctttgtgaaagttagcatggatggagcaccttacctccgtaaagtagacctcaagatgtacaagagttacccagagctctctgatgccttggccaaaatgtttaactcctttaccacaggaaattgtgaatcccaaggcattaaggatttcatgaatgagagtaataagttgatggatctattgaacagctccgactatgtcccaacttatgaagacaaagatggcgactggatgcttgtcggtgatgtaccatgggagatgtttattgattcatgcaagcgtctacgtatcatgaaaggaaaggaagccattggactcgcaccaagagccatggaaaaatgcaagaacaggagctagctagactagtctttacagtccataacctgctccatgtgatgcccagttgacttggcaactgaagcaacgttaagctgcagcagaaacatatggactcatgagctagctgttaaaaatatatagatataatttgtgtatgtgtaacattattatatggtttgttatatattattttaaaaaaaattaattaagcattgagatgtccaagtataaattatgaccagaaacgataatgactctaaattatgtgtttctgttgcaaaactctatttatatttacttgttgtgtgcttgcataag

SEQ ID NO: 797 - DNA, 953 bp, Populus trichocarpa
gctaacacacaactgcgtgccaattataagcttagagagagaacagagagagtgggttttagagagagagaaagggagtgatcagtttctgagaggaaactaagagagagcgggcaaaaaagtattctcatcatggaagtggagaagggaacaaagatggggtttgaggagacagagctaaggctagggttgccagggaatggtggaggggctgaaggagagatggtgaggaagagaggattctctgagactgtggacttgaagctcaaactttcttccaaggagagcggtgctgatccaaatcatgagaagaccagcagtttgcaaagggagaagaatcttctggccactgatccagcaaagcctccagctaaggcacaggttgtgggatggcctccagtacgatctttccgaaagaacatgttagcagtccaaaagagcagcactgatcaagagtgtgagaaggttcctggcggcaatgctacctttgtgaaggttagcatggatggggcaccttacctccgtaaagtggacctgaagatgtacaagacctaccaggagctttctgatgccttagggaaaatgttcagttcctttactataggcaattgtggatcccatggattgaaagatttcctcaatgagagcaagctcatagatcttctcaatggcactgattatgttccaacttatgaagacaaggacggtgattggatgctcgtcggtgacgtcccatgggacatgtttgttgaatcatgcaagaggctgcgaataatgaagggaacggaggctactggacttgcaccaagagccatggagaagtgcaagaacagaagctacaagtagtgagagccacagcctgctcctttgatctcgtgggtcgcaggaaccaaaaagatgataaaacgcgtagatggattgagcaggttgttctcgtggagctgtttctgtaa

SEQ ID NO: 798 - DNA, 941 bp, Arabidopsis thaliana
atcaaccagctcaccaagaacaagaacaagaagaagaagaacaagacaagaagaacaaagtacccaagaaaacacacaagaaggaaacacaaagattgatattgatccaaaagcaatggcgtacgagaaagtcaacgagcttaaccttaaggacacagagctatgtcttggattacccggaagaacagagaagatcaaagaagaacaagaggtttcttgcgttaaaagtaacaacaagcgtctatttgaggaaactcgtgatgaagaagaatctacacctcctaccaaaactcaaatcgttggttggccaccagtgagatcttcccgtaagaacaacaacagtgtgagctacgtgaaagtgagtatggacggagctccttaccttcgcaagatcgatctcaagacatacaaaaactaccccgagcttctcaaagcgttagagaatatgttcaaagtcatgattggtgaatattgtgagagagaaggatacaaaggatctggatttgtaccaacatacgaagataaagatggtgactggatgttggttggtgatgttccatgggacatgttctcttcttcttgtaagagactcagaatcatgaagggatccgacgctcctgctctagactcttccttatgatccagagaagctgagaatcttttgtctaaaaaggagatgatgactatgatcgatgaatgaaaaaccctttttggtttgattcggatcggagtttgactaaagttgaccgtgaaagacgaaacttcggggttttgtccgacgagagatccatctctagtgatgttctttttgtttttgtatttagatttgaagtttgatgtaaagatacatgagattttatgtataatacggacacatacacaatctatagatgtataatgtattaagtagttatgtcctataagatcatcagttttctgtt

SEQ ID NO: 799 - DNA, 837 bp, Arabidopsis thaliana
acaacacacacaagcattttcaaggatatcaaatcacaatcccaagaagagcaataacaagagaagaagaagtagttcaagaattaaggaagagagcttctccgttaaagtatagtgagagaatatggaagtcaccaatgggcttaaccttaaggacacagagcttcgtttgggattacccggagcacaagaagaacaacaactagaactttcttgcgtcagaagcaacaacaagcgcaagaacaacgactcaacagaagaatctgctcctcctcctgcaaaaacacaaatcgttggatggcctccagtgagatctaaccgtaagaacaacaacaacaaaaacgtgagttatgtgaaagtgagtatggacggagctccatatctccgtaagatagatctcaagatgtacaaaaactatccagagcttctcaaagcactagagaacatgttcaagttcacagtaggtgaatattccgagagagaaggctacaaaggatctggatttgtacctacttatgaagacaaagatggagattggatgttggtcggtgatgttccatgggacatgttctcttcatcttgtcaaaaactcagaatcatgaaaggatccgaagctcctactgccttatgatccattgtctcaaaacaccttttggtcgaggcaaaaacaaattctactttgtttagataaaaaaaagtttggtgtaaagaaagaaaaagcaatagggttacaaatacgttatatagatgtaaactagctttggttaattctgtaaaagatgagttttgattatacgaagtttatatgtatgctcaagatatttgatactaacataa

SEQ ID NO: 800 - DNA, 1178 bp, Arabidopsis thaliana
gctgttactgctaccgacaagcttagctttttttcctttgtccttaattcagaaaacagtttcttctctctctaccagtatctatctttattctcctttaacttgtataaaacactcagcttcctcgaagcctctcatcttcatcatcagcagcttctctatatctctcctctctttcaaggataataaccaaaagcttttctttttatcttctcctgcaattcttgaagaaatggatgagtttgttaacctcaaggaaacagagctgaggctgggattaccgggaacagataatgtatgtgaagcaaaagagagagtttcttgctgtaataacaacaataagagagtactatcaactgatactgagaaggagattgaatcatcatcaaggaaaactgaaacatcccctcctcgaaaggctcagattgttggatggccaccagttagatcttacaggaagaacaacattcagagtaagaagaatgaatctgagcatgagggtcaaggaatctatgtgaaagtaagtatggatggtgcaccatacttgaggaaaatagatctgagttgttacaaaggatactcagagttgcttaaagctttagaagtgatgttcaaattctctgtgggagagtactttgagagagatggatataaaggttcagactttgtgcctacttatgaagacaaagatggtgattggatgctcattggtgatgttccatgggagatgttcatatgtacgtgcaagagactaaggatcatgaaaggatcagaagccaaaggtttaggctgtggtgtatgagatatatcttcaagaaatctaacagagacacaaaagaacttgaagaaaaatagagtttcttttggttcagagaaatctctgtctgtgcttgggttgtcgggtttctcgggcaagatctatgttcattggattgaatccaattcatagcctttatttacctcatcggtaaaattcaaatgtaaacatgcttaatggtcttaagcatatgaaactggaacctaattacattttgtttcagaaacagggcaaaaggttgtccttaaatctttggttatgtgtattacattaattaaagtgttatgaagattgaagagttgtttttatatttgtagcaattctgttttgcgttctcattgatcaaagagattttcaagca

SEQ ID NO: 801 - DNA, 1090 bp, Solanum lycopersicum
tctatatacagctctcttatttcactttctccttatatattacagcaagctaccatttagcatcttcaaaccaatcttggagaagaaaaatcatcagttttggagaaggaaacttgaattgcaatccaattttgtgaaaaagaaaaatggagtgtgttttggctcatgagaaagatttgaatctcaaggcaacagagcttagattgggtttaccagggaggacagatgaagaatctgacaaagaaattgtatttcatttcaagaataacaagagggctttgcctgaggatgaagattgtgaatcaaactccatttcagatcccaaaactccacctgttgccaagacacaaatagtagggtggccaccagtaagagctaacaggaaaaatagctttccatcaaagaaagcagaagctgaatgtgggatgtatgtgaaagttagtatggatggagccccttatcttagaaaaattgatctgaaattgtacaagggttatccagaactgttgaaggcattagagaaaatgttcaagctgagtatcggtgaatattcagaaagggaagggtataaagggtctgaatttgctcctgcttatgaagataaagatggtgacttgatgcttgttggagatgttccttttgaaatgttcttatcatcatgtaagaggctaaggataatgaaaggatcagaagcaagaggattaggatgtggagtttgagaagaagaataataacaagattatgaattcttctctgttttaaacaggaaaaaaaaaggggtctttttgagcttgggttgtcgaattgcaaagaagctggaaatttgttttacactgattgggaagtgcaaaacagaagaaagagcagtttttgttttgaaggggttgaaaaaaatgaaactcttattcctatatgttgtgcaggcttttagaaaccatggtggtttttatagatcctgcagtgtgttaaatagcatatgaagtatgaagaatgtatttgctctgaaagcaattgtatagacacagtattctcaaatgtaatgagtttttttcctttgtactacttttaatctacgggttttaacacaaag

SEQ ID NO: 802 - DNA, 854 bp, Solanum lycopersicum
gccggggacctttttcttgaaatacacaacttcttctgagatagtaaataaaggagcaatcttgatcaagaaagtgtttaaagaatttctgtgtgtgtgtgttttgagatttgaggatttcatttggtgttttgggtatttcaagattcaatttttaattttttttggaggagagaaagaaaatgacaagtatagtgggcaatcagaaagatctgaatttcaaagccactgagctgagattaggtttgcctggtacagaagatcaagaatctgaccaagaaatatcaaattccaagaataacaacaaaagggctttacctgaatcaactcatgatgaagaagattgtgaatctaagtcaagttctgatcatgtcaaaaccccaccacctgttgccaaggcacaaattgtgggttggccaccagtgagatctaacaggaaaaacatcatccaaccaaagaaaacagaatctgaatctggaatgtatgtcaaagttagcatggatggtgccccttatctaagaaaaattgatctgaaaatgtataaatgttatcaagaactactaaaagccttagaaaacatgttcaaactcaccataggtgaatactcagaaagagaaggctataaaggctctgaatttgcccctgcttatgaagacaaagatggtgatttgatgcttgttggtgatgttccttgggaaatgtttatgtcttcttgtaagaggctgagaataatgaaaggatcagaaacaagaggcttgggatgtggagtttaacttataaattataaaaattcccaaatagaatattatgatgatgaagaagttttttttccctcttttttacagtaaaaagag

SEQ ID NO: 803 - DNA, 1321 bp, Populus trichocarpa
gcctcaaaggtgctgctattgctaccgacaggcttagcttgcctttgtccataattcatgcatttgaagagagaataacaaggcatttctctcaacctcttccttttgtatataaaatacacttgtttccattcacacctgcatcccctcacagaaaaactagctaccatttctctcaagaatcattaccaaaggaaatcacaagagcaacttccaagtcttgtatacatcatctcttagcagttcctgtttttgaacaaagattgttggaaaatatggaaggtggtgttgcatatgagaatgatctaaacctcaaggcaactgagcttagactggggttgccagggacgagctgtactaatgaagaacaagcagtttctggtgctagaaacaacaaacgaccattgccagagaccagagaggagcgtggagcaaaaggcaaatctgatcctcgacatgatgaccaagaaactgcccctgctcccaaggcacagatagtgggctggccaccaatcagatcctaccggaaaaacaccctgcagccaaagaaagctgaagccgaggctgcggctgggatgtacgttaaagtaagcatggatggagcaccataccttagaaagattgatctaaaggtttacaagggataccctgagctcctaaaggctttagagaacatgttcaagctcaccataggtgagtactctgaaagggaaggctacaaaggatcagaatatgcacctacttatgaggacaaagatggtgactggatgctgattggagatgttccatgggatatgttcctgtcatcctgtaagaaattgagaatcattaaaggatcagaagcaacaggttaatttgggttgtggtgtatgaaaaacccacaggccatgttaacccacaggatcagggagaagagaagattcatcccttgagaaaatctttcagcttgggttctccaggaagaaaactcaaatctgaatctgggtctctctcttgactgggttttctacagatggctggaagttttagacaggaaacaggaaaaatcagagtgaagttacggtttctatatatcgtagggtgtggcagcgagatatctggtggtttggacatctatggtgtcattttgttggtccttgtaatctcaccaaaccaaaactggatacaggaagttattattgcttcaaatgcaattatgtaaaatcaaaacagaaaagaaacatatggaaattaagacagggtcgtccatgtttttgccatgtaatgttctccatacaccgctaaagctaaatacaaaagtctgtttgacagttctctaaca

SEQ ID NO: 804 - DNA, 1209 bp, Populus trichocarpa
ccctcgcagagagaatactagctattatttatttctctcaagaatctacatatcaaaaggaaacaacaagagcaatcttcaagtctcctgtgtacatcatctctttacagatcctgcgcgtgaacaaagattgttggaaaacatggaaggtggtgttgcatatgagaatgatctaaacctcaaggaaactgagcttagactgggtttgccagggacgggttgtaccaatgagaaaggagtttctggtgctagaaacaacaaacgaccatttccagagaccagagaggagggtggagcaaatggtaaatctgatgctcaacatgatgaccaagaaactgcctctgctccgaatacttattcatttgatatgcatgcgacatgcagggtacaaatagtgggttggccaccaatccgatcctacaggaaaaatagcttacagccaaagaaggctgaggacgaggctgcagctgggatgtatgttaaagtaagcatggacggagcaccataccttagaaagattgaccttaaggtttacaagggataccctgaactcttaaaggctttggagaacatgttcaagctcaccataggtgagtactctgagagggaaggctacaaagggtcggaatatgcacctacttatgaggacaaagatggtgactggatgctagttggagatgttccttgggatatgttcctgtcttcctgcaagaaactgagaatcatgaaaggatcggaagcaataggcttgggttgtggtgcatgaaaaacccacaagccatgttaacccataggagcagggcgaagagaagattcatcccttgagaaagtctttcagcttgggttctcctagaagaaaactcaaatctgaatccgcgtctctctcttacagagtttttcacaattggactggaagttttagacaggaaacaggaaaaaccagagtgaagttacagtttctatcctagagtgtggcagcgagatatttggtggtttggacacctatggtgtcattttgttggtccttgtaatctcatcaaaaccaaaactgcatacaggaagataatattgctccaagtgcaagcaattatgtaaataaaaacagaaagaaacatatggaaagacagggtcgtccatgttttgccatgtagtgttctcaatacaccactataagctaaatataaaagtgtgtttgccaagttctaacaa

SEQ ID NO: 805 - DNA, 875 bp, Populus trichocarpa
atggcatacgaaagcgatctaaatctaaaggcaacagaactgaggttagggttgcctggaagtgatgagccagagaaaccatcaactactcctagtgttaggagtaataagagagcctcgccagaaatatcagaggagtccaggtccaagggcagttctagtgtgtcctccaatgtcgaaaatggtgaaagagacagtgcccctcctgccaaggcacaagtagtgggatggccaccaatccgatcttataggaaaaattgcttgcaaccaaagaaaaatgatcaagttgatggtgctggcatgtacgtaaaagtgagcgtggatggagctccttatctcaggaagattgatcttaaggtgtacaagagctacccagagctcctcaaagccttggagaatatgttcaagcttaccattggtgaatactcagagaatgaagggtacaacggatctgaatttgctcctacttacgaagataaagatggagactggatgctagttggcgacgttccatgggacatgtttatctcctcctgcaagaggctgagaattatgaaaggatcagaagctagaggattgggctgttgataaaacaaaaaacaaaacttgaaacctgtcaacaaaaggagatatggtgatttaggggaagagtaatttggctttggatatattctccgagagattaggtctcttaggaacagaaacaagttgatcagatcttctttttttggcttcggttctccctccttggttttggtttccaagatctggatatgtatcaattaaactatagagacagaaagatcacacttttttatctgaattatatataaacgagcgagtctccaatattcagtgctagttacagaaaaaaa

SEQ ID NO: 806 - DNA, 600 bp, Populus trichocarpa
atggagaggtcaatggcatacgaaagacatctaaatctaaaggcaacagaactgagattagggttgcctggaagcgatgagccagagaaaccatcaactactcctagtgttaggagtaacaagagagcatcaccagaaatatcagaggagtctaggtccaagggcagctctagtctgtcctccaatgttgaaaatagtgaaggagatgatgctcctcctgccaaggcacaagtagtgggatggccaccaatccgatcttacaggaaaaattgcttgcaaccaaagaaaaacgatcgagttgatggtgctggaatgtacgtcaaagtgagcgtggatggagctccttatctcaggaagattgatcttaaggtgtacaggagctacccagagctcctcaaagcattggaagatatgttcaagcttaccatcggagagtactcggagaaggaaggatacaatggatctgactttgctcctacttacgaagataaagatggagactggatgcttgttggagacgttccatgggatatgtttatctccacctgcaagaggctgagaattatgaagggatcagaagctagaggattgggttgttaa

SEQ ID NO: 807 - DNA, 1141 bp, Medicago truncatula
ggatctcacatctctttaacatctcacaaagattatcaaagtttaagcactacaaggactttctttcttgcttctatacaattgttagagaaattctgaattatttcaaagatggaaaacaaagttgcatatgagaatgatctcaacatgaaggctactgagctaagattaggacttccagggacagaacaaaatgaagaacaaaaagcaaaaatttccaacaaaagaccattgactgaaacttcaaaggatagtggttcaaaaacttctgatgatgcagcacctccttcaaaggctaagatagtggggtggccaccaataagatcttacaggaagaacagtttgcaagaggctgaggcttctgggatttatgtgaaagtgagtttagatggagctccttaccttaggaagattgatttgagggtctatggtggctatgcacaactcctcaaagctttggaaagcatgttcaagttaaccataggtaattattctgaaaaagaaggttataaaggatctgaatatgaacctacatatgaagataaagatggtgattggatgttagttggagatgttccatgggagatgtttgtgacttcttgcaaaagactaagaatcatgaaaggaacagaagctagaggtgtttgagaaacaaacaaaaacaacaaagttagtatgaaaagtgaagtgttttggtgtgaagggaaaaaacaaagaacctttctgcttgtgttatcggaagaactaaacaaatggatttttgaatcactgtagtgtatgctatgctgctatcagcatacatatctatctgaagttgtgctctaaggaagggaaatggaagatacagtgcagtttcttagtttcctcaacattaattaatttctggttactttagcatctaggaagagatgctattctatgctgttaattatttctactgatttttttttctatgtttcaaatgagaaatctcatagagatttgctatcaaatgaaagagatagagaagggtgctaatatgtattatattgttaatccaagttttttcttgtattgatgcaagattaatacagtgtagtataccaaagtgttgtataaatttctttgttattgaatggactaaaaattaagtataaaaaaa

SEQ ID NO: 808 - DNA, 1100 bp, Medicago truncatula
caaccttgcatttcctactttcacacaattgttacacatttcctcttgtaacatctcaaaagaaggagggaaaaaaaaatattgtagcatcaaattcctaaaactttatagtgactatatattttctaattgaattagagggttttgcataagcaagatggaattcaaggcaactgagcttagattgggattaccagggacagatgaaaaggatatgaaaacaatacatggtagtgttgttaagaataacaaaagacaattacctcaaacttctgaagaatctgtttcaatttctaaggtttcaaatgatgaccagcatgtggagagttcttctgctgcccctcctgccaaggcaaagatagtagggtggccaccaattaggtcttacaggaaaaacactttgcaagaggctgaagttggtgggatatatgtgaaagttagcatggatggagctccttaccttagaaagattgacttgaggatctatggaggttatccagaacttctcaaagctctagaaaccatgttcaaattgaccataggtgagtattctgaaagagagggttataagggatctgaatatgcaccaacctatgaagacaaggatggtgactggatgctagttggagatgttccatgggacatgtttgtgacttcctgcaaaagactaagaatcatgaaaggcacagaagctagaggtttgggttgtggtgtatgagaaacaactgaatttttcctatgactatatgcaagaaaaagagttttggtgtttaggaaagtcaatctttcaattgctggagctaatggattttgaatcttgatttggaagggagatggaagatactttctacataaactttgtcaacatgtttttttggttattttagcatcttgaagtgatgctatatgctatattgtttgttatttccactgaacattttcaataacattttcagaaatttgcatcaaagcaactttgtatacttatagagaattagaattagaagagtcatggtttgttttgtatcaatatataaatagaaactttaattacgtagttatttttttgacagggaaaataaatacatagttgctactct

SEQ ID NO: 809 - DNA, 949 bp, Populus trichocarpa
atggaatttgagagagatcttaatcttgatgcaacagagcttaggttaggcctccccggcactgccacaaaacagtcagagaagcaaacacctaactcaaatcttgccaagagcaacaaaagatcattgcctgacatgaatgaagagcccgcaggatcatcaagggaaaattctagcactgtctcatcaaatgacaaaaaaagccatgaccaagaaactgctccacccatcaaggcacaagtggtagggtggccaccaatcagatcttacaggaaaaactgtctacaagcaaagaaactagaggctgaagctgctggactttacgtgaaagttagcatggatggtgctccttatctcagaaagattgatttgaaggtttacaaaggatatccagaactccttaaggccttagaagagatgttcaaatccaaagttggtgagtattcggagagggaagggtataatggatcagaacatgtaccaacgtatgaagacaaagatggagattggatgttggttggagatgttccatgggatatgttcatcaattcatgtaagaggctgagaatcatgaaagagtcagaagctagaggtttgggttgtgctgtgtaaagcctcacacatgcaattcaggaggcccctaacaaaagatgaagaagagatcagaaagagaaagggaagagttgcacttttagcctgggttctccgagaagaaatatcaaatatggatcaattttatcacccagaaagaaaaaaaaaatggatctggatttttcctttgtgggattgcatgtaatagaagattttacaaggatttgttaggatatcacagatctgcatgtatagttggcaaatttgcttcttgaatgcaattgtacaaagagttctacatcagatcacaagtttctccatgtagcaaaggaatagatcatatttaattacttataaa

SEQ ID NO: 810 - DNA, 1107 bp, Populus trichocarpa
tcaagtgcaattacaacaacacaggaaatactgaaggttgaatttgctaccatttcggaagaggaacaagcttcagtttacatccaaagatcgttgaacaaagaaaagagaagaatggaatttgagagagatcttaaccttgaggcgacagagctcagattaggcctaccgggcactgccacagaacagttggagaagcaaacacctaactcaaatgttaccaagagcaacaaaagatcattgcctgacatgaatgaagactctgcaggaagaagggaaagttctagcgtgtcttcaaatgacaaaaaaagccatgaacaggaaactgctccacccaccaagacacaagtggtagggtggccaccaataagatcttacaggaaaaactgtctccaagcaaggaaactagaggctgaagctgctggactatacgtgaaagttagcatggatggtgctccttatcttagaaagattgatttgaaggtctacaaaggatatccagagctcctcgaggtcgtagaagaaatgttcaaattcaaagttggtgagtattctgaaagggaaggctataatggatccgaatatgtaccaacatatgaagataaagatggcgattggatgttggttggagatgttccatgggaaatgttcatcaattcatgcaagaggctaagaatcatgaaagagtcggaggctagaggcctgggttgcgctgtgtaaagcctcatatgcaagtactgttaacacaagatggagatcgaagagatgatctgaaaagaatcaatctccttgattatgaagactagatcgaggtgcactactctgagctagcttggactctccaggaagaagtatcaatcatggacctgttgcatgaagaaagaaaatgcatggatctgtattttttctttatgggataggatgtaatagaagattttaagagggtttgttaactaggagattacagatcttcttgtatagttagcatatctgcttttggaatgcaattgtacagagaaatacatatgatcacaagttttttccatgtaccgatgaaaggtttaattaagttttcatgctataattaagatacattctccatagcaa

SEQ ID NO: 811 - DNA, 790 bp, Medicago truncatula
cggccggggacatcaaccgcatcttattcttccatccatctcatttatctatcaattctcaatttacacattcacaccaacaaatggaaaattctttggggaaccatcaaacagaaatgaatcttaaggctacagaattaaggttgggattaccaggtagtgatgaagtggaaaaacttccatgcaatttttctgttcttagaaacaacaagagatcttctccagaagaagcaagtgatgtagattccattagcaagagcaaattgaatagttctaatggttcttctcataccacaaatgatgaccaagataatgctccaccttcaaaggcacaagtagttggatggccaccaataagatcttataggaagaatagtttgcaacaaaagaagggtgaagaggttgggatgtacttgaaagtgagtatggctggtgcaccttatttaaggaagatagatctcaaagtttacaagagttactcagaacttctcaaggttttggaaaatatgttcaagtgtacaattggtgaatattcagaaagagaaggttacaatggatctgaatttgttccaacttatgaagacaaagatggtgattggatgcttgttggagatgttccttgggaaatgttcatgtcttcttgcaagaggttaagaattatgaaaggatcagaagcaaagggattgggttgtttttgaaccaagaaacaaaggaaataacagtgaagccattcaagagagtttcctctaattgtcctctcaaaatcagaggcatacttagctgattaaaa

SEQ ID NO: 812 - DNA, 736 bp, Solanum lycopersicum
attcaaatcaatcattctttctaaatcatgagaatttacgagaaggatatcaatgatcttgaggcaactgagctaagattaggtttgcctgggataataaacgatgaatcttcaacatcaactagtacttctaaaaatagcagaaaaagaccttcatctagtagtgtaaatgaaaatgaacaacaagactcagctcctgcaccaaaagcacaagttgttggttggccaccagttcgatcatacaggaaaaatcatgtgtctaaattatcagaatctgataataattcctcaggaatgtatttaaaagttagcatggatggagcaccttatttgaggaaaattgatcttcaggtttacaaaagttatcaagagctactcaaggctttacaaagcatgttcaagtgcactattggagtgtattcagaaagagaaggatataatggatctgattatgcaccaacatatgaagacaaggatggtgattggatgcttgttggtgatgtaccatgggagatgtttataagttcttgcaaaaggcttagaattatcaaaggatctgaagctaaaggtctagcatgtctataaaaacatggaaatatatataaacatacatacaaatctgctagggatgaacaagtttcagttttgtaaactatctcgatcttctattagtttcacgggatatatagatctagatctacatgtacaaatagttttatccttctttttttttttt

SEQ ID NO: 813 - DNA, 1337 bp, Arbidopsis thaliana
gatctcatctttaaatttttttgtttcccatttctctcagaaagtgttctgttctttttttcttttgtaatcactaaatgcttcaaaagtttgtccacaattatatttgaaaaaaatgtctgtatctgtagcagcagagcatgattacataggtttgtcagagtttccaaccatggaagcaacaacaatgtctgacaaaaccaaaaccagagacaataacaacggtctcaatttcaaggctaccgagttaagactcggtttacccggttctgagtcgccggagcgagtcgactcaagattcttggctctcaacaagagtagctgtcccgtgtcaggtgccaaaagggtgttctccgacgctattaacgactctaacaaatgggtcttctctcctggatccactactgctactggtgatgtcggctcgggttctggtccccgtacctccgtcgttaaagatggaaagtcgacaactttcactaaaccggctgttccggttaaggagaagaagagctctgctacagctccagcttcaaaagcacaagtggtgggatggccaccaataagatcattcaggaagaactcaatggcttcttctcaatctcagaaacctggtaataactcagagactgaagaagcagaagctaagtctggaccagaacaaccttgcttgtatgtcaaagtgagtatggaaggtgctccttacttgaggaaaatcgatctcaagacttacaaaagctaccttgagctctcttctgctcttgagaagatgttcagttgcttcaccattggtcagtttggttctcatggagggtgtggcagagatgggttaaacgagagtcgcttgactgatctcttgcgtggttctgagtatgttgtaacctatgaagataaagacagtgactggatgctggtcggagatgtcccttgggaaatgtttatatgctcctgcaagaagctgagaatcatgaagagctctgaggctatcggcttagctccaagggtgatggagaagtgcagaagcaggaactaggaaaagcccttttatgtgataatatatgatttgaaaaaatatgtttttaagaaattgaatagccattttgttttgaagtattcttgtgtgtttgtgtgctaggagtgatgtttgatctttcttaaaccagcctctactaagctctaataaggcctcttcctcttacttctttctctaatcaatctaatgaaacatatgggtttgtgtatgtgtgtttgccaaggaagacttcataattcatatgtataaaagttttggtagtgtgtaaaccggatgtggttttcattgttatatatgttttgga

SEQ ID NO: 814 - DNA, 1383 bp, Medicago truncatula
  misc_feature (205)..(205): n is a, c, g, or t
acatcaccttcatactctcgtctcttcattctaagttttctataactatcatcataagtaataataatttaaaccttgtgttcaatatttgatatattttcacctagccattttcatgtctacaccattagaacatgattacataggtttagcaaataatccttcaatggacaaaacatcttcatctctcaacttcaaggaaacntgagctcagactaggctgacctggttgtgaatctcctgatagaaaatcagtttctgctgctggtgctggtggtggagtctctttctttgccaacaaagatttgaagagcattaatgtttgttctcctttgaagaaccttgtagctagtgttggagctaaaagaggtttctctgatgctattgatgagtcttctaagaaatggagtttctctatgaatgatggatctgaaggaggtagtttgttctcgccaagaggagggaatgttggaaaacctcttgctggtttagagactcaaactaatattcaaaagattaatacaaatgcaacaaaaaacatcaaagaggttcttcatcaatctgtacatgaaaagaataaacaggtttctggaacaaatgagcatgctaatgctcctgctgcaaaggcacaggttgtgggatggccaccaattcgatcgtttcgaaagaacacgatggcgtcaaatttgacaaagaacaatgatgaagctgagggaaaaccagaattttgactgtctctatgtaaaagtgagtatggatggtgctccttatctcagaaaggttgatctcaagacctacaacaactatatggaactttcttcagctcttgagaagatgttcacctgctttaccattggtcaatgcaattcgcctggacttcctgggaaagatggactaagtgagagctctttgagggatcttcttcatggatctgagtatgttcttacatatgaagataaagatggagattggatgcttgtaggcgacgttccttgggggatgttcgctgactcgtgtaggagactacggatcatgaaaggctctgatgcaattgggctagctccaagagcaatggaaaaatctaggagccaaaactagtccagaaaaactcgttggaccaaagaggagaattcactgatatgcatatataaaggtttacaaggaagtttgagtttatggttatgccccaaatcaaaaatatatgtaactcagtttctcagtttttgtgaattaatagtctgacaagtttttagttagtagaatttatctggagacatgtccagagaatatatacacatattttgtttgcatatctgttttgtgcacctttgaagtttgtgtctgtataaaagaatggcttgttatgctttcaatatatgattt

SEQ ID NO: 815 - DNA, 1317 bp, Populus trichocarpa
tattttcactacttctgtgaccaactttgatgtcttctattccaaaggaacatgattacataggcttgtcagagactccttcaatggaaaaaatctctgacaagctctcctcttcctcctctaccctctccactgaagagaatatcaacagcaacagcaacagcaacagcaacagcaccaatacttctctcaacttgaaagaaactgagctaaggcttggcttgccagggtatcagtctccagagagaaaactaacactacctgcagctggggtgtctctttttggaaaagatattgacaccaacaacactaatggttatcctcttaggccgctaaagaatttagtgtcaggaactaagagaggtttctcagatgccattgttgggtcttctgggaaatgggttttctctgggagtaatggatctgaagttgatttgggtaaaggagctattttgttttctcccagaggtgataatggtaattcccagaaatcttgtgttgcaggacctgccaagaaagatgatgttgctcaatctccaaagccagttcaagagaaaatcagccaagtggctgctgcaaatgagaacagcagtgctcctgctgcaaaggcacaggtggtaggatggccaccaattcgctcattccggaagaataccatggcctctagtttggtgaagaacaatgaagatgtcgaaggcaaatcaggatatggttgcctgtacgtaaaggttagcatggatggtgctccataccttaggaaggtggaccttaaaacttacagcaactatctggaactctcatctgctcttgaaaaaatgttcagctgcttcaccattggacaatgtggttctcatgggctgcgagggcaagatggtctaactgagagtcgtttgaaggatattcttcatggttctgaatatgttctcacatacgaagacaaggatggtgattggatgcttgttggtgatgtcccttgggatatgtttaccaactcgtgcaggagattgaggatcatgaaaggttctgaagcaattggacttgccccgagggccatggagaaatgcaagaaccggaattagcgaaaagagtgcatgaagtcatgaagcttaagaaggatgttttctagattttaagagagccttatagtgtgttgaggtgagctctttgctcatgaagcttgtgcttggaaattttatttagtgtatgggagaaaaaaaaactttttactagtgagaggatgtcattgaacatgcatcctagcttttcttcttccacttgtactttaatttgtgtaaatgaatggattgcttgtgggta

SEQ ID NO: 816 - DNA, 1334 bp, Populus trichocarpa
gtacatttcttaatattccatccatcactcaaaaggaaaaaagaaaaaagaaaaaaatctatcctttctctatcttttttgcctttcttcttcttgaaaaccagtgcatgcttttgttttgagcgagctttgctttttgatgtctatgcccttagagcatgattacataggcatatcatctgaggtttcttcaatggaaaacacctctggtactgatacaataaacatctctaccactgcttctaaaggtcttaacttgaaagctactgagttaagactcgggttacccgggtccgactcaccagagagaggtaatgagaatcaacaacttggtttttccttaaacaacaacaatagcaaagacaagagctttgtgtctggggctaggaggggtttctctgttgccattcatggtggctctgctaactgggttttctctgggaatgccggatctgacccgaatttttctcttcgaggtgctaattctggaaaagaagggttccctcactcatcgaagcctgttgtgcaggagaacaagagtcaggttgatggtgctaacactaatggccatggggctgctcctgcttctaaggcacaagttgtgggatggccaccaattcgctcatttcgaaagaatacaatggcttctcatctttcaaagaatgatgatggtgcagaagtcaagtcaggatcagggtgtttgtatgtcaaggtcagtatggatggcgccccttatctgaggaaagttgatctgaaaacatttggcagctacatggaactctcttcggcactagaaaagatgtttagctgctttacaataggccagtgtggctctcatgtagttcctggccaagatgggttgagtgagagtcgattaatggatctcctgcatggttcagaatatgttctcacctacgaagacaaagacaatgattggatgcttgttggtgacgtgccttggaagatgttcaccgactcttgtagaaggctgaggattatgaagggttcagaggcaattggccttgccccaagagccatggagaagtgcaaaagtcgtaactagtatgatgtgttctctagatggatcaaatcctctgtgcaaaagataatgcaggttgctatattccatcgttgaaagcctttaacgggtctcagatatcggtcccctgtttcttatttgcgtatgaatatcgtaccaagacttgtataataaatctcttgtaggctagacactatcaggttttataggattgtccgctcacttgtattctgaattctggatgatctagctacaatattctgtataaaatggtctgagtgttacaaaatcacaa

SEQ ID NO: 817 - DNA, 1392 bp, Medicago truncatula
ctcttttgatcttgctgattcttcggggtattgaaagattgaagctttttttcttgtttgaaactttgtattcattgtgatgtctctaccaaggctagggataggtgatgaggaaagtaaaagcaatgttactttgttggaaaaaagtttgcatttgaatggttcaaaaccaaaagagttcaactacatgggattaccatcctctaattgttcatcagtggatagttcagttccaaaaattcaatcttttaaagatgagaccaaaagtaatttgaatcttaaagctactgagcttagattgggacttccaggatcactttctcctgaaagagattcatcagatttttgtttgagaagttcaaagcagtttgatgaaaagcctctttttcctttgcaccctcaaaaagatgatcatctttttgaatcaaagcctgctgttttaggtaacaaaagagggttttctgatgccatgaatgttttttcagaggggaaattgaagcctagctccaaaatgcttgagaatgttgccgggcagaaagtgaaagccgatgaaatagcaacagttaagattggtcttgagagacctaatggtgttggtgaaagcaaaccaggtcttaatggttctgcaaataatggaaatagcactgctcctgctagcaaggcacaggttgttggttggcctccaataagatcatttaggaaaaattcattaacaactgcttcaaagaacactgaagaggttgatggaaaattgggatcaggaggtgcagtgtttgtgaaggttagcatggatggtgctccttatttaagaaaagtagacttgaagaattacactgcatattcagaactatcttcttctcttgagaagatgttcagctgtttcaccataggtcaatgtgaatctcatggaaaccagatgctgaatgaaaccaagctgagggatctgcttcatgggtcagaatatgttattacttatgaggataaagatggtgattggatgcttgtcggtgatgttccctgggagatgtttattgatacatgcaggagactaagaatcatgaagagctctgatgccattggtttagcccccagagcagttgaaaaaagtaaaagcaggaactaagcagtaagcagtatcaataatggtcacacacactctatctatctaactgtctatggtgtgaaaatgtttcagtttttttgtttttattattgtcacaatttatataatccctaagacattttagtgtgaaagattcttatatgtcctgttgtgaaggattagtgtgtgaaactgtgaaatattgcattatatatgtttgtggctttgtgtgttgttgaaaacaaaaaactgtttaacttaatatggaatgtaacttttacagtttctag

1. A method for enhancing yield-related traits in plants relative to control plants, comprising modulating expression in a plant of a nucleic acid encoding an ASPAT (Aspartate Aminotransferase) polypeptide comprising an Aminotransferase class I and II (Aminotran_{—}1_{—}2) domain (Interpro accession number: IPR004839; pfam accession number: PF00155), and optionally selecting plants having enhanced yield-related traits.

2. The method of claim 1, wherein said ASPAT polypeptide comprises one or more motifs having at least 50% identity to any one or more of the following motifs:
(i)

| | |
|---|---|
| Motif 1: NPTG, | (SEQ ID NO: 207) |
| (ii) | |
| Motif 2: IVLLHACAHNPTGVDPT, | (SEQ ID NO: 208) |
| and | |
| (iii) | |
| Motif 3: SRLLILCSPSNPTGSVY. | (SEQ ID NO: 209) |

wherein any amino acid residue maybe substituted by a conserved amino acid.

3. The method of claim 1, wherein said modulated expression is effected by introducing and expressing in a plant the nucleic acid encoding an ASPAT polypeptide.

4. The method of claim 1, wherein said nucleic acid encoding an ASPAT polypeptide encodes any one of the proteins listed in Table A or is a portion of such a nucleic acid, or a nucleic acid capable of hybridising with such a nucleic acid.

5. The method of claim 1, wherein said nucleic acid encoding an ASPAT polypeptide encodes an orthologue or paralogue of any of the proteins given in Table A.

6. The method of claim 1, wherein said enhanced yield-related traits comprise increased yield, increased biomass, and/or increased seed yield relative to control plants.

7. The method of claim 1, wherein said enhanced yield-related traits are obtained under non-stress conditions.

8. The method of claim 1, wherein said enhanced yield-related traits are obtained under conditions of drought stress, salt stress or nitrogen deficiency.

9. The method of claim 3, wherein said nucleic acid encoding an ASPAT polypeptide is operably linked to a constitutive promoter, a GOS2 promoter, or a GOS2 promoter from rice.

10. The method of claim 3, wherein said nucleic acid encoding an ASPAT polypeptide is operably linked to a green tissue-specific promoter, a PR promoter, or a PR promoter from rice.

11. The method of claim 1, wherein said nucleic acid encoding an ASPAT polypeptide is of plant origin, from a dicotyledonous plant, from the family poaceae, from the genus Oryza, or from Oryza sativa.

12. A plant or part thereof, including seeds, obtained by the method of claim 1, wherein said plant or part thereof comprises a recombinant nucleic acid encoding an ASPAT polypeptide.

13. A construct comprising:
(i) the nucleic acid encoding an ASPAT polypeptide as defined in claim 1;
(ii) one or more control sequences capable of driving expression of the nucleic acid of (a); and optionally
(iii) a transcription termination sequence.

14. The construct of claim 13, wherein one of said control sequences is a constitutive promoter, a GOS2 promoter, or a GOS2 promoter from rice.

15. The construct of claim 13, wherein one of said control sequences is a green tissue-specific promoter, a PR promoter, or a PR promoter from rice.

16. A method for making plants having increased yield, increased biomass, and/or increased seed yield relative to control plants, comprising transforming the construct of claim 13 into a plant.

17. A plant, plant part or plant cell transformed with the construct of claim 13.

18. A method for the production of a transgenic plant having increased yield, increased biomass, and/or increased seed yield relative to control plants, comprising:
(i) introducing and expressing in a plant the nucleic acid encoding an ASPAT polypeptide as defined in claim 1; and
(ii) cultivating the plant cell under conditions promoting plant growth and development.

19. A transgenic plant having increased yield, increased biomass, and/or increased seed yield, relative to control plants, resulting from modulated expression of the nucleic acid encoding an ASPAT polypeptide as defined in claim 1, or a transgenic plant cell derived from said transgenic plant.

20. The transgenic plant of claim 17, or a transgenic plant cell derived thereof, wherein said plant is a crop plant or a monocot or a cereal, such as rice, maize, wheat, barley, millet, rye, triticale, sorghum emmer, spelt, secale, einkom, teff, milo, and oats.

21. Harvestable parts of the transgenic plant of claim 20, wherein said harvestable parts are shoot biomass and/or seeds.

22. Products derived from the transgenic plant of claim 20 and/or from harvestable parts of of said transgenic plant.

23. (canceled)

24. An isolated nucleic acid molecule selected from:
(i) a nucleic acid represented by any one of SEQ ID NO: 81, 147, 153, 183 and 185;
(ii) the complement of a nucleic acid represented by any one of SEQ ID 81, 147, 153, 183 and 185;
(iii) a nucleic acid encoding the polypeptide as represented by any one of SEQ ID NO: 82, 148, 154, 184 and 186 as a result of the degeneracy of the genetic code, said nucleic acid can be derived from a polypeptide sequence as represented by any one of SEQ ID NO: 82, 148, 154, 184 and 186 and confers enhanced yield-related traits relative to control plants;
(iv) a nucleic acid having at least 30% sequence identity with any of the nucleic acid sequences of Table A and conferring enhanced yield-related traits relative to control plants;
(v) a nucleic acid which hybridizes with the nucleic acid of (i) to (iv) under stringent hybridization conditions and confers enhanced yield-related traits relative to control plants;
(vi) a nucleic acid encoding an ASPAT polypeptide having at least 50% sequence identity to the amino acid sequence represented by any one of SEQ ID NO: 82, 148, 154, 184 and 186 and any of the other amino acid sequences in Table A and conferring enhanced yield-related traits relative to control plants.

25. An isolated polypeptide selected from:
(i) an amino acid sequence represented by any one of SEQ ID NO: 82, 148, 154, 1184 and 186;
(ii) an amino acid sequence having at least 50% sequence identity to the amino acid sequence represented by any one of SEQ ID NO: 82, 148, 154, 184 and 186, and any of the other amino acid sequences in Table A and conferring enhanced yield-related traits relative to control plants.
(iii) derivatives of any of the amino acid sequences given in (i) or (ii) above.
